United States Patent Application Publication US 2006/0154250 A1 - sequence listing, part 7

SEQ ID NO: 785 - DNA, 45315 bp, Mus musculus
  misc_feature (1)...(45315): n = A,T,C or G
aagttaatttatgggctggaaagatggctcagcagttaagaacactgactgctctcccagaggtcaagttcaattcccagcagccacatggtggctcacaaccatctgctatggaatctgatgccctattctggtatgtctgaagacagagacagaatattcatataaataaaatcttttttttttaagttataagccaggtgtggtggtgcacacctttaatcccagcactcaggtggcagaggcaagcagatttctgagttcgaggccagcctggtctacagagtgagttccaggacagccagggctatacagagaaaccctgtctcgaaaaacaaacaaaaaaaactccaaaaaaacaacaacaaaaaaaaagttaatttattacacaaaacagatcctgagtcctaaaactctcaggatccatgatatatgataaattaactttgactcatctagaacagtatttaacatgtgtgttagagaatggtcactttaaatctggtctttcttcttcaccgtcatggcaatctctgcttccttcctctctcctcaaagtcacacctcagtctatctccccagacatgggccattggctccttattgattgatcaaaaaccaattggggacaaggactttcaccatttggtcatacagattcccagtttggggagccagattaattcaaaacattagaatcaatccccaacaacttggcgctaaagcaaatgtccctgggttcagtcctcagcaccacaaacccaaaaggaaaaagaagccagcaatgaaaaagaagagctctatatcaacatggacgtgtacactgaggtaggtatgagtgaaatgaaacttagccttgagagccatcctaattcagcaaaacaggacaaaagagctgattcaagttaagtggtaacaaagcttgataatactgaatcccgggggcaggcttgtgagaatcattatgctctgttttattttgtggttgaaggctttattgtttgtttgtttatttatgtaatttgcagcataagtcttaagcctgtaatgttatgttacctgccccttgaccctctccccgtataaggagatttgaaggagaaagtgttatttcacagttttggaacttctgacacaagcgttttcagatagtgaatagaacctagaagctgcagactaaatagaaatgaggttcatgctagtggctgggtccatatggaggctccctagcatagctcacaccatgagtaatcagagaggcacctcatcacctggttttatgaagtatgcctgtgatttcccagccctataaaagttgagaaatcaagaaagaaaagccatagagaacttaggtaaaaatgaaaaggacaaatcggtagtttagtaaaaacatctctgaaattgttggctgacatggggataaaaatatctattccatttaattcaaagatgctaaaaaattatttctatttctgtcttccctctaaataaactctctagaaactaaaaatttgtactttggtgtcatgtaagtctataaatgttttagtctagaaacacttccccattttaaaaataaaattagcttgttttagaaatgggatcagttttcctgtaaaacggcccaggttccagatttctgcttccttataagtatggcttgtttctattaaatgccaaaattgtcctttggtatggaagctctttcttgcattatcttcagtttgtactcctgtgggatagtttgtggagtggttaagatgttgattatgtttcaaatcctagtccttcctaatgccagctgagtgaccttgagtcagttactgaaggtatctgagttttaaatgggaaaaacaaaactccatagaattctgagaattcagtgagatagcatatgtacagtggctagcacatagtaagtaaagtgaatattttacactaacagcagaattactatctccagtatcattcttaataccatatgtgaatatccctatacagccattgtagatgttctttaacaattaaagaggcaaggccttctctataacacaagcacattggtccattgctgtttcagcgtctcttaatgagctgagctaatacaagtacctctagtatggcttttatgttactgcctaagtaaagacattttctatgttcctaggttatgatgacatagaatttgaccatttgattttattcattattcctataataagtctacttagcacaaaaaaaaaaaacaagtttttttgaaggtggaagatgaaggaagagagtttgccaaataagtgggtgtgccaattaaattgcaaatcagtctgtcctccctcttgctcaatctgagggtgagttgatgcctgtttgtaaatccttcctggttcaaagctgtaggtaccctcatcaaaggagatccacccacctttgaattgctaaaattgagttatggttcagcctaaagaggccaagcctaccctatgttcccatgtgggcacaatattttctctaaggaattaaaaacattttgtcataaagtaaaggtacaagaacatctttttctgtcatgcatcagaacattgtattgtatacaaggcagcttatcagggagggagactgaagagatatctcaggggtttagaacactggctgcacttgtaatggacccgggtttgattcttaccacccacatgttggcttagccacctgtaattccagctacaggatccaatgtcctcttctgacttttgctggcaccaggagcacacatggcgtacatacatagatgccagcaaaacattcacataagccttaaatgctttaagatgaaaggaaaaactgtaataccactcttgtctttgaggggctggtatcagctagtttttccatgtggctctaactcgttcttaccctgtcaataacttcagtcattcaccttagatacagtggagcccagaagagggttacacaggtacatgaggagcaagaactgagaataggactaacaatgggaaagcaaagggagagtccaaagcaaagtgggatggagcataaactaacacaacaggaatgggcagtttagctagtcatgagttcgtgacaacagttgctgcttattattcctttgtagatttacatgtcatggatcaacctggaagtccattgattaaggaatgtgtctgacacagacaagtgatgatagctgaagacagttgatgctcagtaaatatttatctcttgcttcccattgtttaaaccccttttttattacctcttcctcttgacagttgccaagatggaaatgtatagatgagtggctcatctacatatagtttatgaattagtttggctctagaagcgtagtacagttggacctgcatttctatatactttcccactgaggcagcaggaacagggaattggctcaggctattataggtgatataattctgtttgtctgacatccaggaaatgatctgtgaggcccctttatgtgcctgtgttagccaggagcccttatctttgtagttgggactagaaatcttgctaagatgggcttaagttgggtgttgcccctttgtaaatctcatggggttgatagcctctccttggggctttagagagctgggagcacttaggtcagttggtaggagtgtcccttaggattaactggcttttgtttgagtgaagtgccctttgaatttttcaactttagacactaacttcctttgaggccaagtgctctgtgaaaacttgcctgatctcttgtggccagaaacttcccaacacagtatagctacttaaactatttagcacacagccattttacttgataaccatttataggtttttggggttttttgtttgtttatttgtttttgttttttaaagatttacttatttttattttatatgtaaagatgttttgccttcatgtatgcctgtaccacttgcatgcctggtacccctagaggcaagaagagtgtgtcagatctcctgaaattgaagttacagatggttgtgagccatcatttgaatgttgggaaccaaacctggcttctctgaaagaccagtatacttttaactattgagccatctctccagcaccaggattgaatgttttaactcagggcattgctacacaaccctcattctgtgtaatgtaaggatgtgttaagaacctggaaagccctgtcatattttttgcttttttcaagtgatgtctgtccatctctatagctagagcatggttactataaactgggaaagatcttgttccagttcattactaggaagtaggggcagaactatttactaaaaatgcttagaaaaatgattagggcttgagagtaagaatttctgacaagatagatctcaaatcagggaatttaagtcaaccctacttaacccctgaggcttgcagcctgcctgcctgttaggtcatttacacgaaggctggccaatatgtatgcatgtctctgtctcaatatatcatgttttgatccaaataagcaacacacaatccagatagagaataactccatcataaccaagatcccttgtgttatgctataaacttaaactcatattttccccctcatcaccatccctaacaccatcatctttatatccttttcatcttcataatttttcactataacatatatatatatatatatatatatatatatatatatatatatatatatatatatatatatgaaatcatgtactttttggctttttgatgggaccatttaacttttggtttgtttttgtttttttcaagacaggatttcaagacatcctggccatcctggaccaggctggcctcacattcagagatcactttgctctgcctcctgagtgctgggattagaggtttgtaccacctacaccaggctcataacaatttacttattgaggaacatttataaatttttgctgtttcgataagctgctgtggacatttatgtactgggttttgtgtggatagaaatggccacttaatcagtatacattcccaagaatgaaacttaattatatggtaagtacatttcaaactttctttttttaattaatttatttattttatgtagatatgagtgtactgtagctgtacagatggttggtgccttcatgtggttgctaggaattgagtttcttttaaggaccgctgctcactctggtcaaccgtgttccctcaggcccaaagagttatttattattatacataagtacactgtagctaacttcagatgcatcagaagaagggatcagatctcattacaggtggttgtgaaccatcatgtggttgctgggatttgaactcaggaccttcggaagagcagggagtgctcttaccctctgagccatctgagcccacatttcaaactttaaaaatgactctgtgtacacacatgcatgtgtgtgccatggtgcacatgtggagatcagaagacaactttcggaagtcagttctctccttccatcatgtgagttccagggactgagtcccgttctcaggcatggcagcaagtgtcttcttacctgctaagctatcttaatgactcgcagtttacatttcctaggaaaatgacagtatgttctgggggtcatgtgtttgtttttgacctgctctgctaggtgtcaatgggtaaaaatggaggttgcctacttggtcctcactgttacccttgtgggaccaagcacacctcattactattaagatgggtgagaattctgactaggcctctattggcagtcatgtgggaggaaggatggaccttctctggacttccaacagtactttggtgtatgagttggagtactcatcatcactggaaggaggtaaaggtttcttcgagtttgaagttctcagatgccacctcagggcatggggatctgttgtagacaggtgtgagcagaaatctaggtcccctccagtcttggctaacaggagtgaaaagcgatagtattctgtgtttgttcggagtgggctgcttattgcttggctgcagtttgcttggtccttggactggacatggttaacttttctaggcacttcccttcctccctcctggcagtgtctgtgtcagcctaggtttaacctagaattctgcctctgcctcccaagtgctggggtttcaaatacggaccactaggctcagtattttgaacccttcatgaaaccctcttatcataacagcttgttgtccaaaggatacaatttcaacctgttagcatggtcattcactgctcttaactgtctcactacagttaagaacagtcataacttctgtagttttccacagtgcacacgtgctatgcacacgtgcccctccagctatgcagaatttccttcagtaccatgctttttgtggtatgttgttttgcagatgtgctctctggttcccaccttctcatcgtctctacatggtaagcagctagccattcctcaaatctgagcatgttacatatagtgaagctttctgatattaagaactatttgatcccacctcgggattatccttacctgtatgaatacactctgtagtgtgctttcttgtttgcatcgatttaccaacttacccttgaggtgggactgtgctatacatctctgaactattcagctgtaagttctttggagttaggcactaagcctgtcttatcactttgtcctctgcctagcatagaacggacactgagcaaatgtttattaaatcggtaaatggatgaattattactttcatccaaagaccatctgcaacttatgagactaggtcacggagacaaactccttcttaccattgccatttgcttcttcttagttttcccttaaacaaagcaactttgaacaattataaaattaagcactcatgccacactgttcccccttctataaggactttgaggttgtgctgtttccgttctgctggtctactagtgtcctgaggaggctggatacaggagcagcagcagatgtggtgtgggaagccagttcttcaggatactacttaccaccagtccagtctttggtgaattgaaaccctgtttgtaactacttttatcaaggcagagcttttcctggatagacatttcagaaaggtagctttcattgagtgacatagcataggtttgttttgtacacaagcacactgtgaaggattttgcaagacaaacctgtgccactatacacatcagctcttgtaagaactctgatccgatgtttaatgcacacataatttctctacctacaagaattactgaacatgtcaggcactattacacattttcatataagtaacttatagttcttacatctgcctcatactgcaggtgttactgtccatgttttgtagctatggaaactgagaataagaatcgatcctgactctaagtagtgttttgtacttttagtgtccatctctcaatgaaaaaatcctagtattatatttcttccaatatcctgacttcctgcccattgggtcacatctcctgagacaaagttcttctattgtctgctttataagacagaaatggaagaagggaaatgcatttttaaggtaatgcttatgtgtgtgtgtgtgtgtgctgatattttatgttcttcagcctagtaacttcttttggcatttggtcgctaatattcaggagcattcaaggccttttatcccatccataaaaccaaggaagacactcattgctaaacagaaagcctagaaagtcgcatgggtgatcagtgaaactcagaagcagctgaaactgatacttggtggctaaaatggctaataccattgagtgtcttcatcccacgtgcctaatactgaaccaagtaattagagggctgccggtcaggagttaggatcttctcctttggtggctgactgagtggctcctcccttcctcatttcttcaaacaccggtcacatctcacagggtttgagaacatgctgtgtgggggtgtcagatacaacaggaagatgagacaggagtggagaggtgctgttagtggggagaaggattacctgggttgtaatatccctctgtgtcagtctcaagcagcaggaagcagagagcatccaggtcacctacaggagcaagtgatagacatgccccatgtgccatcctaatgcctggacagggagtcatggctcgaatccataggcagcaaagactgtttgagctctgctccttagtacttgttggcacataatggggcatacatactcttacagcctcagagcacttagagtaagagcttatgagcaccgtacagttccagcactcagcagatgcaactatggaagataccagcacacctctagaaaagcatgtgaaacaaacagtgtgactatctttcaagtggagagacagctgtcttccactgctgaagtctagctagcaccacagaagcgctggcaatagtctctccattcttccactgatgtctacttactgaataacctcgcatggctgcagcttccttggttcatttgtatggcaaccagatccttctcttagtcctctagaaatcagtagctgccattctgaggatgccagctcactctgtgtgtcttctgtttaatcaggagtgtttgccacctgggtttgaagtgcccagggcagatgagagcttaaagtcatgctacctattttgatacccatgtatgccccacttcactaaatggtaaaaaagggatgtggagtttatttatttagtgtgtgtatgtatgtctattttatttggtacatttgcctgtgtatgcacatatgatggccagaataggaccctgagtgtcttctgtcattctccattattgtcttacaacagggtttcttactgaataacagacactcggtttggggggctggctggctggccagtgaggctttcaagctctacttgtcttcctctcctagtgctgaggtcagtggcctgggcagccatgcctgcttttttatgtgcatgctggagattcaaactccggttctcatgcttgcacaggaagtgctcttactgagccatctccctagaccctgtacttagggatttcactgaattgtactacatgatactcttggtttccagcattttacacgacatggcatttgtgcctcctgcctattgccttctccttcctctaatcctttacccctgcccttgacttgttgcctttatttctggcactagacccatactcccaactgctggtattatccaagggttttataactctgcttaccctttttctgcttgataccagggctgacaagccaagcccattatcctgagtccactgtttggtggagttgttactgcacctccttgaccttgctctgaatactggacactcctaagagttaggagtgggtggggtaagggctaaacccattcctattttatgtactattaaaaagtttacttttgaggcgaatactttccctttccaccctcagtattttgcccttggtttcgtacacaagaatctcgtcgcagcttctttttataggtggaaatttactctgaatctttaagctagaagcagtcatttttatgagcacggaagacccttgtagctcttcactgccacctggctgcgtgcctggaaagtggagattggagtattggcaacatagttactggctagtggagctttaggaaagctccggcagactcagtgaactcagattcgtctgagcaagcagaaccagaacctgagaggtgggtttggggatcattttcctccctgagacacttccagggctcccaaagagagcccgcagatcatgagtcagcgcggtggtcccactgcgttcacttacacagagcaccggatttgctttgtgtcagggcacagaactgctcaagacaggtagcactgcaggaaacccaacgtcacacagagttgatgacttgtaggactgctgttttcagttccccatcccctcgtgggtagtgaaatggaaaagcccagacaagaaagaggagccccaggaaactcaagactgctggtttctgactaggagagaaagttcgagaaaacagatggcagtacatagaaaacagtggctagtgagcacagagggatagctaggacttgcactcggcgcgacctagagggcaggccggtcatgttcaaggggcggaggctctggccatgggcctgcctggggcgggccagtcggcggggcatttaaatcgctgccgccgctggccgggacgcgcgccggctctgcaccctccatagtctcagcttcgagtgccggcgcctcaagatgcggtcctccctggctcctggtgtctggttccttcgcgccttctctagggacagctggtgagcagggctggggagggaggctgccaagacgcgcagagacttgctcgggcggcggatgtttctgcttgtccctggagtgggggatggggttctagttctatctggcagggctccttcggtggcgcaggcgtggaagtttagtaacacagaactattaattccacattagcccagacttctgtctaaccccggtgaagaacaaacagggtgcctaggagtcttcatcctttttggtttgccaccccgtatctgcaaacacaagcgcacaagcgggtacctgtggagtgcctccaagtcttatctgtgtatttggaggatccggatttgcctttgaggaacccaggccaagaactggtagaatataaatggagccagagagcttaaggcccctattgattagattagttaacaagccagaaatcactggttctattaagcctgtctgacccttccagtctcagggatacctagctagggcaagatctctgggatcagagctgcagctgctccaacactgggtggtcacccttaaaagcatgagctggcattgacagcagctgctcccaggaccacaaggtcacccttgtgctgggagaagaggttttagccaatctccattgagcttttggagcagtgtacttggtctgcaagaggtggggaaggaagagtgttaaaacattttgttagttaccgtcatttataaactataaaacttaacaaaatagccagttgctggcttctaaaaaaaacaaaacaaaaacaaaacagatgacacagcaatctcaaatctaaattctcaaactaaactaagggtcagattgggcagatacttagtcatcaatttggcctggttttaaaataagtcattttgtttcaaggtctctcaggctaataatcatctaaaacattctttagatggtttatgtggtcctttctacatttggaactattaaacagttttatgttttcagaaagagagaaaatgtctctcaaaaggagatgaacacgagagtgagagcgtgtactgccctcataatgaaggagctagaagatgtcataattgggtagaaagagaattcaaggggaggggagagttgccgtaaggtggatgtggatggtagcgatgggcgcacagtacacttgctgtccctgactttagctgccctgactttacatttaaaggtggttgagatgataaggttttgtgctatgtatattttaccacaattttaaaaagcataatataaataagctcatttatacattaagactcttgaagctgtctcactagtggacatattttatatgacttatcaattagctgcaacttcagagactaaaattgctcaatgtcaagaaaaactaaaatcaggataaatgacagactagagtcagataatctggaaagttttctctctgtaaaacatccttttctttgtagactccatttcaggtttgtttttttttaatctctaagaaaaaattttgatcacacaataaagtgggtctccttagatctaatctcatggtttacttatgtacagcaaaaacattaattaaccaaataggtcatgatcagtgctcttgggagttttcataaggaatctttttaagaaaaatttaaggtgtgtgtccgtccccgtcctttggcagtggtggtgcatgtgtgtctctgtgaggccagaagtcaacctcagatgtctgccttcagcagccatccatcttagtttttgagacagagtttcttactgggacccggaacttaccagcgagttccacggagctttaagtagctccagcctgtctctgccttcccaggcctgggggcacagatgcagccgccaccttgtcaggccttaaggtgggcgctgaggatgatgctcagcttgtgcagcaagtgctctgccgactgagcttgccccattctttcttttttttttttttttttttttttctgttatggaaaaagtgtttattttgaaattattttaattgagaagtagaaaacctcataggaaggaggaagaaacaaaacaccacacagcattcaggcaacgctttacttcatgccctttcccccgctctggctcactcgtcccatgatgagaaggactcagccacccacaataatgttattaatgggtatatggatcagtttcacgaagaagccaatgaatcccatgatagcaaatcctatagctgtagccatggcaatcttctggaattcttttctgtcgggtttggtgcatcttttaaccagccgaattgagtcctttacaaactgccggctgggctccacaaactgcattacctgatccatgtttgttggatggcggattgagagcgtagagacacgtagctcaggagagaaccctccccattctttcataagtagccgtgcattgtttttttaaaaatagatattttactatttactgccctgagataagatgccaagatttaccagattttacctgctatagatttgggcagattcctctttctttacacccccccccccaaatatcataaggcttttagatctgaaaaactgactgacatcttctacctgtaagacagggaactcagaaaaccactttccttggagtgatctattagtattgactccatacaatgaacctcagtctcttcaaaggggctgatatagttgatattaaatagacatcctggtctactacaacatccaggcaaggccctggttacataatcagttctaaataggctcttgttaaaaaaaaaagaagatattcttattgaaagtttacaagtagccatatcaccctggaaaacaagaagactcactgaaagtttctgcattctgaggagttcagtttaaacaaaacaaaacacaacacaatgcctattaaactgtcatgggttatggatcacctaagaggaaagaaaaaggtcttccttatactggcatcctgaaaagggagcactgcaataacatttcaagtataagtgacagtcattggtagttcacttattcctgtgtgattagtgctggtcctgcacatcctggcttcgcaatctctggaacacagtttctcaggaagagcagaagagtctccctaactgtccactactgtgtacttacagttgtccaagtggggctgtcagaagagtaagtactcaatttatagtgaacaagcacatgttctagagaggaaaaactcttagatacaacatacaaaaaaaatctcagatgggctgaagagatgcctcatttattaagagcactggctgttcttccagaggacccaggatctgttcccagcaaccacatagcagctcacagccatctgtcatctagttccaggggatttgataccctctaacccaatgggagctaaacatgcaagtggtgcacatacatgcaggcaaacactcaaacacataaaataaaaataaatacatccctaaagaaatttgaaactcactcatataatatgcaaagactataaacaaaagagtaagtttggggtagttccctaagcagctgatttgtagggaaggatcagtggtctgggaagttgctgtatttcaagttaaagaaatagagttgcaacctatgttaacattttggccggtagctgaaattatggcagacaactctgcatgttgccatgaggtaaagcaacatcaggatcagtggaaacacgtggctaggcctgtaattgtctgactctcagaaagctgaggcaggaggattgtgaattcaaagccaacttgggcaagtagagggaccctgtttcaaaatagaaaataaagaaaggctgatgttgcagtttactggtagagcacttgcctaaaacacgcaggaccctagtctcaatccccaaataccacaacacaacaccaccaccaacaacaaccaaacatggacagagaccgcattccaaaatctttgtaatttatcatacagaaatttctgaactattacaaatgatggcattttatctatatgagtttaatgtggagaaaactacttttatcttctgatttcccagtgatgctaatgttaactgatgagcattggtttataaagccatcctagtttcagtactgcccttttttaaaatgtaaaagataaaatccagatggttttccaggaactctgattttcaccattatgtgaaacaagtccccacgcctgagcctgccctgacatggttttatcacactctcttgcttctttccagacttaacacttgcacctactataacccaaggcaaatcgcactcccatccacaaaacacaccccataactacgagtggcaaatgctctaccaccaagctacaacctcagcccaaagtagcacatatcagggaaaaggagggtgaatcgtgataaaggcccatcgtacaacaacctctcagtacaggaatgcacacaacacagccttctaaacacacatcacgtgtgcaatgtcttttaaaactaatgtctccagtctacaccggtcttgaactatgtagcaaagtgtgaccttgaattcctgggctcagggccttgtacatgctaggcaagcactctaccaactgagctacagctcagttctgcttgcacacttaagtgagactaacggctatactctgcaaagttcaagacatacagggataggaatctttttaccacactgcactctagggttatttacgttttagatcctcatcagtggaggcgaggtggttctagagggtgtgtctggtagcacacggaaagacacctgacttctgtggctgatggaggaccctcaatagatgttctcttctattttcctagagtgtggtgactttagatgctcccccacccccaagaaccaaagtatagttctgctgaaaaaatgttatactgaactctggggctcacagagaaaatgaaagcatcatctcacctcagaattaatggtagagctgaagagttgcggtgcccacagcagtcattgatcgtatttttactttgttttatttgtttatttggttttgttgccctaggtgtggaagccaagatcctgggtaaaccaagcaagtgctctgctgctgagcactgttggcagttttagaggtagcactgagcgccaaagggcaatggttcacacacacacacacacacacacacactgggcctctcagtggccagatgaactgactgtgaagagagctgcctcctgtgaggacatctggatagagggagagctagaaactgcttggcatgtaagaagcatgcagtaactaaaggtgactctctgtaggtaccaaagatcattatagacagattttaaaccagtgcacattttctgagctaaacaaaacataagctgaggtggggacaacagggtaaggacttacagtgtgaaagaaagttagaaatgaactctgtcacacattactttcacacggccctaaggagagcatcgaaatagatgtgaagatagcagacagtcttggactcttcacctgtgaagtacggataacaggatacctactcctctgattgctgaggtttaaacgggaaagtgtctggatgggtgccaggcctgcgttaagtcccgaagacttaacaagaagcagctttactgctaaatgccattctataaacttttcatactaatatataccatggattactaatctgtctttttttaaaagacaaatgaaccgttagttcccccatgagacgcactgataaaatgagagacagaaaagcatgtagcttgtacagcatcgtgttgctgacaaatgactgagcggagttggatccaggttaatctgactcctaagcctttcctcttcccactgtactcctgatggtcacgtggatggaaaatgcaattacactgtcatttgtcattttagacaaaccacttaatctctctgaggctacatttccttaacgataagagaataattacaatttgtatatcttatcacgatattaagattaaatgagaagcttaattttacatttacttagttcatatatatacatatatatacacacatatatatacatatatatatatatttttccaagacaggcttttctctgtgcagacttgactgtccttgaactagctctgtagaccaggctgacctcaaaccaactgcctctgcctcctgggtgctagaattaccggagtgcggccacagccttaaaagaatatttttaattgaaatagaattataccacattccctcttatccttcctctaatccgcccagctcccctccctcaaacctctcccttaagttgataacctctttatctttaagatacatatgtaaatgaaaagctttttaaagcacttaggcctctgtagttgggattggctaggcagttgtactgtttgttgtagtaggggttcacccattgggaggaggccaccttgaatccttaaatctgtcagtctttgtctgggtgttgactgcttggttctctagccagagggggcagtgtgccagaaaacactccttgaagtggggctgtgagcaggtggcaccaggagtgtggaggccacagtctgtggagtttcagcccagtaggtgttatttcacaccctgttaacagcaagtagaccaccagttcattgtgcttctgagccaccaaacaccaaactgcctgtttccttgtgctactctgttcatgggcatgcctgggggcagctgacagcacgggcatctttccagagagatggctgcagctggtgcttatagggctgggtgagcttcctgaggcctcctgaggaggagaaactcaggacctggaggagggagcgaggtgacactgcagctagatgagcaggaatgggtgtggagggagccagctttcacaggcaggagaggctagagcttgactcccacgctgattgtgttttccccataccttactcttccctgggaggctgggcgatgctgacagattgctctgtgttgtggagttggtgaggaaggtagaacagaaaagtactcagacacacatggagagatgctgtccttgttgaatatctgtgcacccattgcgtttgtcagtcctcgtgacagttttgggtagtgctttattcttttattttaaaaataaaaccgaggcttgagaggctaaacagtttgctcaaaagtcacagtaaccaaaaatgaaggctcagcttcctttggcttaagtcctgatgtccttttccctattctgtggccggagggctggaatcagatcttcgttcctgatggttcctgtctctcatcttattttcctgttcttttaaagagatgcttgataagggcagcagaaagaacagcttaaggggctggagagacggctcagcagttcagagcactaactgctcttccagaggtcctgagtttaattcccagcagccacattggtggctcacaaccattataatggaatccgatgcccccttctgctgtgtctgaagagagcgacagtgtgcttatattaaaaaacaaactaacaaacaaacaaacactgcttaaggaaagctgtggtgaaagccagctgccttgtcctgcaggggaatgatcccaaggatgctggagtctcatcttcctgtcaccagcatgtgacctgggcccatcccccacatcttattgcagcttcctcttttcctgctgatgtttcctctttcccttcttaaaagacaaatccatgtgacaccccctcccccaacccccacctgccagctcaagctgtgtggactgtctaggaggcagcaaacagcttggagttgactgcatagttcaggatcaggatctttcctcagtcaaactgtaccagtactcactgagatgagttagacagtctcaaagtaatactagcacaaggcacaaaagctgtcctgggttaacgggccagcccatggaaccccatgcttcttgctgggattgagtgttggattagagagatccgtggacataaggctgggtcctaagagccttcccagagaagaaaccattggccagtaaccacaggaactcagaactttctagatgaaacttgttctaaggtttatgtatttatttattttgaaaagaggaatatatatttgagaagaaagccaaatcaaatagggaagccctgagagctcagaaagaatgagtgcacagggctataaggtacagcttgagttgttaagggtgcaagtttgtgggcttcagaagagctggccaataggggcagagccctgagatcagactccgcccccatatgactgtcactaagttggtgtgatggtggaggacccgggtgggatgtatcactactttcttaacctgtagcttaggccttgggccttgacttctgcatgcactggagacagtgagggtgaggctaggaccaggactcctaagggtcctagaaggaaggccatcatcctatttctcaaagtaggactacagctatgtggctgtcaccacattcccacctgtgctctgttcagaatacagcctatgttcaggagtgtggacaagagacctggtattccacaggcctgctccctgccccaagaaagctttctcctcagaggccttcctagcctgtcctgtccctccttgctcttgtatgctgcaggcatgactcaggactctgcccctgggtatctgtccttagctggccctttcccactagaatatctcccagtgttggttgatggacgacttagtagaagttgaaggtggtggcacagcccaaattgatcctggtctggttgttaccgtacccagccttatccttttcagaacccgctgaccctagaatcggcacacccaggaacaggtcgccaggttcgtttccacaggggaagtgctaaggtcacctgcagcctcgtcctgaggtcacatcctgaggctgtcccaggttaagagagtttaaaccctgattgtctctaagtcatgggcaaggctatcagagaagtagatgtagaacaaagaaagaggaaggcctgtttctacctctccagagatcagagtcggctcttggaggtcatgttggcttgtggtggtggcaatgaagtacttaggggtggtgtctgtcattatctgttgctaatgtgggatacattgttccctgttcaagcccagaatcattattagtgcaaagtcttaatgaagttgataaagctattatcgaggtcttgggaaagaataagttggattgtcagctaatacttaagagatagctagtccctctctatctgacttggttattcaataaccagcatatagtggaggaggtgggactctaataagtgccacctcttcctaataagacttgcagggtcatgggacagctgagcctatgtggagtagtctgggagtctccccccatatgttccttggcccctgaactgcttgcccagtccagctctgcaccagggcagccattccttgccctggctctacaagtctccctgtgcctcctatggggaatcttggttctgagggaaggaagggcttgtgagaagtgaaacctgcaggtcctgccctgctcagagtcctcagctgtgagcttgaattccttgaagtcttagtctagctccacccttaacctaacccccccccctcccgactcccatgttcctaggcccctgtgctgacagtcagcacctgggaccgtttctgtgaacacctgatgtgccctcaaaggagcactggctagtagaaaggaggcctaactccaacactgctggggcccagcagtcttatgagcttaaccttccaccctatagaggccaggcagaaagccccagaggaagcaggtgtcaggctaacaccatacagcacaggctagaaaccctgtctttcaaggatcctgtcttgcttgctaatttagagggcaggtctttggttgggagattgggatctaggttgggcaggcccctgcagagctgagaaaaaaaaaaaaatcacaggtcagcatactagtatggactggctgattcacctgtctaccctgtggaagacctcagcttcttagagtcactttcctgtatggttgcagactctcttgtaggcagctaccctaccttctataaacaagggaagttaccagcaaccctgggtctttgtgtcttaggagacttaggtaggcatccttgagaggtagggaggaaggactaatggcccccaaatttctgccaggcaatgaagtcctagagctcgccttgtaaagcatgagctcctgttctttttcctatgctaatatgaaacaccagccatgtttttaagtgtccactggctatcagggatgctataagatctgtaacaaacatctgtcaatactgtgaacaaggtgagaaagtccttctcagaggagtaaactggtttagagaataagattatctttgcctgattttaagtccttacttgtctctacagacatgattttgaaatatatctaaggcaccctgtgaagctgtcatgtacttagaagtggctagcaggatggaaaggcaagggatgggccccaccccatagtggggcttccccctggcttcacctggctcatagccaaagcacccactcctaggaaggccccacccttccaatggcttctcgtcctcttcaagagataacccaaactctacctcttggcacacagagccctacctgcctgggccctacctcatctagccacttctgcttctgtgcttggctcaggctcctcctccagatatcctaagccatgcagtgctcccacacccgcagtgttattacatgcctgtgcctttctggatgctttttccctcacccatctcccagccctagttgacttagccatctcctgcttgattttggaaccaaccctatcctctggaaccttttcctgacaccagttctatcccaccgggtttggtgtcccacctgtgctcccctgtgacacaaggcttcctgctgctatggcataggcactccaattctcagtgtgtgtttgtttccctccctggcctgtgagctgcaggagtcagggtctttcttcccatctctcttgcagtcaccggatccctaggcatagaggtggttgcaaggggagtcttattttttccaagaatatatggattttagatttggacattggtgtgactgttctctccaatggcttttcctacctatggttggaagggtcagggctctggatgaaaagagcatggaactgataaggatggatacctgggaactcaggtgggtggaagccagggaaaggtgggctggatctgtctccctgggatgttcctggtatgtgggagtaaagcagtgtggatgttgaatgttgacatgaagggaagggttcaaacagctggctttggcctcctttgtgcctccttggttgcttgcagctcatgaggcatctggcatgtctgctgaggtacagcctctgacttcaagtaacactgggatcttctgttgactggtcatcactgttgtgctctcaggggctccagtgggactttcattcctaaagatctttcagaaccagaaaagacctgatatgtcatgactgtggccacacacacctgtggccttggcacctctgtgtagtcacacaagccaagctgtgtggcacttaaagctggtacaccaggtacccaaggattaggatgagagtgacatagtgcagttgaagaagccagaagcagaaagggcttacctggtaagtgagtggaggttgccacacaaacttgcctgcttttccctggattaggcaatatcccagttaactataaggttgcagattccttctatctattgctctttgcctagactagctgtgtactctctctaaagtttctcagaaaattctagaaatccctgaactaggaatcagctagatggcatttggtagacctggaaagctttcgtgtcaccaatctttttaaatttaatcactgggacaggcaggcatctggggtagccttggcttccttgacgtccctagaagacctgtgtgattcacataggtgccttggaaacaagtagccgaagaggtactttgagattgggtctcattatgtagtccaggctggcctcagagtcccaatcctcctgcctcagcctcctgaattctgagacaacaggtatgcacaaccatccaaggttaagaattaagaatatagtgcagagaatagtaacagatgcctgggtaggaaggaaacttaaatccagggtgaagtgggacagggtttggtagctcaactcaattcaggctctgcagaaacacctttcatttcacaagaggtggcctgcattgcttaattacatgcttgggggaagtgagtttggagtttggaggcagattaccagacagggcagggtgagcatccaatatctgtcttaggttcatgaagccaagggagataagcactccagggcctgctcactcttctcccctaccctattctttaatgagcagaggcaccgagccttctactgtctagcattttctttcaggctggttcgtttgctggtaggttgaaacgcaggacttcaagtatacaaattctgtgttctgcctctgagctgtaccctcggccctgtgctgagatctattttccatatacctcctggtccttgattgctgattcagctcagctgatgccttgctgtggaaacagtgcctcagcagggtgctgcaggatcctccccagacccttgggtgggtgaagtgggtatgctgctatggaaactttgagagattcctcattagactgctctttccctctggctggcccatgagataggcaggagggcaggggagagaacatgggatatgtgagccacagaggaaatgatctttgtacccagtggaatcaactagccggggaccctgagggagaggactcaggttttgtcaccagctgtctcagctgagtcatctctttccatagttggagcctagtctgctgtcatccaagtgcaagggaaatatggacatcactctgtagacagatccctctctcctttaattccatcccatgcctatctgtggccatacctgttctatacaaacagacacagagacagcattgtctcagggagaccctacaggggctaagaggttggaaagaaggtggcaggggtagtttgtatgtacagtgtgtgtgtgtgtgtgtgtgtgtgtgtgtgtgtgtgtgtgtgtgtgtgtacagaggtcctttgttcccagacactcctggtctctgccccagaaacttgtgtctagaagagagcctaaaggcaaaatgttggtggtgccgaggccttgaggatgctctagctgggcttctgaagactgggatgctcctctgtcctgcaggttccgtggcttcatcctgctgctcaccttcctcatttatgcctgttatcacatgtccagaaagcccatcagcatcgtcaaggtgaggctggttggtaaggaagactgtgggacatgtggggcctggtagttgtgtgctgcaatcggatgctctaaacctcagataatcccctcccaatctgatttaccctgctcactggacctgacccttccacctggcagacacccattgtgggtggctctttcctaggacactcttacaatgttttcctacacgatccttttacattcacctcccagactgcaccgttggttggtgtgggtaagctaagaaggcagggggtcccggctctgtggattccattcatgaatattggatggccacctacccttgttggaagaggtactggtaggaagaaaatcatggactgtggtgggaagcagtcatgtttatgattgagtagcaggtttcttgcttctctctgagccaagtgggccccaggggatggtatggcccttgacccatattgtatagtttagacagcactgggtaagctctccttgccattgccttccagagccgcctgcaccagaactgctcagagatggtcagacctgttaatgacacccacgatctcaatgataccacctggtgcagctggagtccattcggtaaggacaggagaacacattgctgcctctaaaccccagtccctccttggacgtaaaagggactttcctgagggggcagccacccagccaagtttctgtccttcccatctgctttcagacaaagatgactacaaggagttactaggagctgtggacaatgccttcctagtggcttatgccattggcatgtttattaggtaagagaaaggcagagcccgtgcccagtgacagggtgggtgggtgcttgataattgctgtttctccttactgatctgggctgcaggctaatgtgagagttgaaagtgtctctgtgtgggactgaggccaagaccccatccaggccatcagcccatgaccagcctccttccttctctatggtcaccaaactgttcctctaccagctactgatggatcctgctgttagcagccctttccctataaagctccctagatgctccatttaaggaagtgttggtgggtatggccaaagttctctaagcacagccctgcacatgtagattcccaaggagagctgtctaaactatacaaccagtgtgagtctcacctagcaaacatggagcttgctaccagcaatcactgatggacaaggcagtgtgtggccttcaaggagctcatagcctagtagagtgaccctcagcttagcagctaattcaacattgtggaagtgttgggtagtcatgtagtgcaagcttagattgaagacaaggagttaaggaaggtgttggaggaggtgagtcttgaaatgtgaagaaccatgggtgttggcagtggggaaggacacccaggctggaggcatcagagagcacagtggggcaagtagagaacaacgtggagtgtaggtagagcctctcacagggttaccagaaggggtacagaagcaacagccagggagacagggctaaaggataaggtcatttgcagagggcctgctccagaatgtggaatgggagaatcatggaaggagtttagctaggcatgagggaaactctgaggtaggcttgaggcagaaagggaaggttacaagctagcatgcctgctgtctacgctgctgagctcggggacaggtggtgtttcagaggctcccatggtaaaaggagggagactttagaatttagagggttgagtttgcattgctttagggacagccaattaaaggtatccagaaggcaatctgaatgtgaccctaaagcatgaagggacacatggggcccaaacacacgcaggaggggatgtttcatgcattgtggtaggtagaaccatcaagctgatgaagctggcaggaagcacgtggttagccagcaaggagggacatgggcaacagaattttcagagttgtgccaagtaaagcagatgacttctggaagggaggactggggtcagccttggaatgcagtaggacacagctcagcactggccaccatggccacagtggcttcagtaatatgggccgggagagggaggtggtagagtggacatggcattaacctggagctcaccccatctttctctccagtggaatctttggggagcggctgcccctgcgttactacctctcggctggaatggtgctaagtggcctattcacctccctctttggcctggggtacttctggaatatccacatgctctggtactttgtgctcatccaggtatgagtctgtgtagcacttgggcctttgttcccctcaaagagaggtccttttgggtccctggacatccccaggtcagagcaggtagggacttggtctctttgtttggtcctcttctcaccctgctcggcaccctgttctgactcccccagaatctcacaggactggctcagtgagcctgccttgtactgcagtgaatctgcctgagatgcctgagaagctaggtctcagctcacatgatcttgagctaggggaaggcagctattgtggcattgtgtgtggacgtgcaagtgagggaaagtcatggtttgcagtgcggggtgtatcaggacgcctgagccgtgtcattgaaccacctctacccaaggtgctcgctcgaggtaactctctcccccttcctcccttctacagatctgcaacgggcttgtgcagactacaggctggccatctgtggtgacctgtgttggcaactggtttgggaagggaaagtgagtgtaatgagggagtgcaaatgaccctgatgggggaagaaggggaggtgtgcgggggtgtgtgtgtgtgtgggggggtgttatctctgaggctaaaagggcagtgctgtttctctatctagtcaacagagcaggcagccttagttataattcctataacaggtgaatttctatttttgattgaagctaaaaggctccaccactctcttttcttagactggcttttgggttagcttgcttcagtttctcaccctcagctctaacggtctgagctgatcaactgttggctctgggggttactggtttctttcttttttttttttttttccagtatacatagcatctccctacaagatgccagtagcaaaacacagtgcttatcctaggagccagctaaaacaatgggcagtgctctcacctgcttgacagcagccagggcctttgctgcactatctggggactctgagaagatcagttgtgggtacatcccaaaggctagatgcagccagccttttgagcttggctgtgccaaattttttgtctttgttttgtttgttttaatgtttttttccagcataaaattaattttatcactcaaagctaatttaaaataaaattcattcaatgaaaaacatatatacatacatcactttttgtatgtttttatattattttacttattcactttacatgctcactcactgcccccctgccagttaccccccttcccttcccttctcttcaggcggggattcatcatgggcatctggaactctcacacatctgtgggcaacattctgggctctctgattgctggagtctgggtgaaccagcactggggcctgtcattcatcgtgcctggcattatcactgctatcatgggtgtcatcaccttcctctttcttattgaatgtgagtggacccttcccaccccacactttccatgccccagttgtgctcatgagatatagcagctggatattctgtaagccttgctgctcagggtagtggatgactagctctgtgaccctaaaactgtcctttcatctataaaatgcttgctccgtaggatttctgaaagtgtaagagggacagtgtatcttcagtgttttgtctgtagtgtgtgctctgccaaaggactgcgtagacagctagtgtttcttccccattttccctgagttagcaaggccaggtgtttctagaagaggcaggcaggcctacagggcctgctcccttaatgctgggggccacatgggacttgtatggctaactctgcactagcttagactcactgtaaagtgagagtctaacctatcggtaaccttctcagaaaggtacttgtttatcccccagatccagaagatgtggactgtacccctcctcggcatcatgtgagtttgccaccccagccctgcccttctcaccacatcacaggaactggccatgtgagggtcaagagttggaggagagagctgtggtcttctagtggcttcacagacccaattttgggctcttaggttaaatgccccacaacctgatatgcctgtcagcccaagagagaaacatacaccttccccaggatggtcatcccctacctctcaatggggctgtccttcccatcagagaaggttggtacatggccctgccaacaggagggatcatcttctttcctcaggatgacccggagaaggaacaggacaaccctgaggatcctgtgaatagtccctacagcagcagggagagtaatgtggacattgcagccagctcctccaaggagcagggccctgagcctgaagccatcagtttcctgggggcactcagaattccggtgagatgtttatggaatgaagggaagatggcctctctagtgattttcactagcttcgagggaacggggtgctaggggtgacaggtagcttcaaggatttccatgcagactgtggggtggctgtttgagaagggctgtgtatatcaggcctgttttgacaggacatgcagcattaggcacactgctgaagttagggtggagtgtatatttgttgttgccttgtgtaggaatgatgacagtcatggggtagtgctagccacccagggggcctccactagactggggatctcttgagcccctttccattctgccttctctcatgtttcccagggagtgatcgagttctctttatgtctgctctttgccaagttggtcagctatacctttctctactggctgcccttgtacatcttcaatgtgggtaagttcaggggaagaggaactgagaaaaagggtctctgaggaggccaaggccacttctggtgcagggaggatatcatacttgggtttcattccagtacacagtcaaggctgagccccatgcatgtctccagccacctgcccccttggagctgagttgggtcttaggaggaaaactctgtcctacaaacctcttttccctagcctgagtctgggctgcttggttcaaaggtgggtggtagtctaccttgaacacctccaattcaaggaagaggctgtgtgagctttcgtactctgtggacttcaggactcttcttccaaggaccgttatgggagtgatgtgtttgtactgtggcctttgggtctacatggagggagctgccccaatataatagctactttccactgttcctaaccaaggctgcaaagatataaggagaacactgttgtggttaaaatggctgtttggttcccacctgctcagagtctctggtttgccatggggtaacataccaaagagcaacatgctctgctttgctggcccccaggattcagagagccacaccccatacccaagaccttttgcccagagctgctttcctgctctggggaaagacagaaactgtcctgctcacacacacacacacacacacacacacacacacgaccaggaaaccatggggattagtcatggccagatctccagctgtagtttgacctatatctctacatgagggcccctgtctctgatactggcagagtactacggcagttttgcagacactatgactctgttttgtggcttttttgctgacttcaaagtatgaatcagccttgagggtggagttgcaaatcaagcttctaaatgttccccttttctaaacccagaatccccatcttcctacaggtctccttctgtggctgtgagcattagtacagacctaaggtggcctgccgaggaaaagcccctgtggagcttgcttctatgttaggagtgggtcaagaagatagctgtgcccatgctcagtcagaaccattatactccagaagagttagagatgctgtcatgggcacgtaccaggcctgcaggagagccttgctgtgaaaggtctaggttatccttcaggcaaagagagcttaggacttggctctgagggtgtgtgtgtcaggctgctgcaaactcacctggtggctctagccaatcacttggccgtgtagcctcagccttttccttggactggattaatgcgccacaggaactctgctggctgtgtcattcaggagatttgttccaaacctccccgtgtgtctgattatgtttttgtgttttccatagctcactttagtgccaaggaggctggggacctatccacgctttttgatgttggtggcatcataggtgaggccctgtccttttgtcctggcatgctgtcttttattttgcttctatgcagaggtacagaaagaagggacagctggccatgatctgggcagagagcgaaagcctcctaatgtattctcatttctgttcctgctagactgggtgggcctaagaaaagtgatcattgctctgtggtttcttggagtgatgggaacaggggaagactgcagagggaggtggtgattcttaaggccagcccagcactgggcagcagatgaggaacagcacgtagtgtcaaagacagcttgcgagtgagcatgtgtttcaggtggcatcatggcagggctcatcagcgactacaccaatagcagggccaccacttgctgcatcatgctgatcttggctgctcccatggtacgttcagtctcagcatgcatatgcttgggatcaggtgtctagggcctggatggacccatgtatccatccctatatttgcctgcacagctatgtctttcttcatgtgtatgtatattcctgggcacatgtagagacagaaaaatgagagtcagcagaggaccaggctctgtgaaaagagaccaggattaataatcccggaatgggattagtgattatctcgccttggtggggaaaggaaacaccagccgtgacattttttgagcaaggaataatgaagagattgaggatagacacaaaagatgtttgtgggagaggggaaattagagagccatgcatgcctgtaatcccaggatttgggaggtaaaggcagggggaatcaggagttcaaagtcttcctcagctacagagtgagtttcaggagaccctgggttgcatgattctcatttcaaaaccataagaaaaataaaaggaaattagagattaccatagttagaccatctattgagacacataaagacctgagaagtgcagatgcacaaggcgggaaaagcaagtgatatgtagaattccagagcaggcggggacgagtccaggcccaggtctcacccagcaagaggaaaacatgtccttctttcttcagatgttcctgtacaactacattggccagaatgggataaccagttccataggtgaggaggtggtgcgactctcacctggtcactagtgaccctctctctggggaactccatgtcatgggtgtggagccaagggcaaggaagtcacttgctatggacttggggctgcgcacagcgcctcatctctaataatgccatctctgctgtcttcctagtgatgttaattatctgtggggtcctggtcaatggcccttacgcactcatcacgacagcggtctctgctgacctggtgagtgggccacttgtgggcacgaggctggtctgagggcgtggtcaggggctctgtctgcaagtccattctcccttctcccgttcccactcgttgtcctgcagcacctctacgggctctttcctttcaacctcagggccccatcaccacccacctcgagctagctttctcccagcactgctcttcccgggtggctttgcttagcttgagctatcccactttactctgtctccccagggcacacatgagagcctgaagggtaacgccaaggccctctccactgtcacggccattatcgacggcactggttccataggtttgttactggtttgggctcctggcagctgaacccctgccttgttatgggtggaccccctgtgcaccaccgaaggtggtgggggaaggtgtgtatgtttctttcatgagactgttctgtataggtgcggctctggggcccctactggccgggctcatttccccgacaggctggaacaatgtgttctacatgctcatctctgccgacgtcttggcttgcttggtaagagttcttgggctacacagatgtcagttggggaatgctttatgtgtacagactggaactctggtataaagcaagcactgggactcctggggtggagagaatggcagctgccctttgctcagaattacttcctcctgtgaggagtgctcttccactaacttctcagccacctgtcccatggatcagctgagcctggaagctcacagtgtcttcccttccctttctacctcgaacccccacagctcctctgcaggttggtgtacaaagagatcctggcctggaagacggcctgcggcagaagcagtgggtgagtttcctacagtggaagccattctcctaacctcacttctaggactcaagccagggctcagttactccatgccgagtctgtgctggtccactgtgggcctcaggaaccctgaagcagcgccccttgatgtgctgttggaccccatcccactccggaactactaaccttgcctctgttgtccccgtgtgtctccatagctctagtctggccctaacccacccgcgatagtattttcctcaagtcccatgacttttgtgagtattttcttcaagtatgactaatacgccatcggaatgtgggctgcatgggaatccgctcctctcctgcgtgtgatttccctcctgcccgccagctttctctgtttccttgggagccatacctggagattcaagctagtcagagcacggtgcttgggacctatttctcaggggatctgagatgctacagagggctttgaacacacccgcagggcaaaggggccagagatctggaatcttttcttctctgaactgaggcagagctgcagatgcctcctaaatgtcagaaatcatctgacccctttgcctgggctgtgtagaaaagggcaactaccaatcaaagcctccggaacaaattgcaaacagtgcttaatccggtgtggtttctgcctggtgtccagaggtggtgggtgtgggagtcgcagaggtcagtgactgagtcagaggctgaggtgctggtgactgggtgactgtccctggggcctttctggctcttcaggcagaagcgtcttactaagaaaaggagctggcaaagcctggacctgggctggatggtaaatgtgaagaaccatctcctggggtcatggtagcccacacggtctggggaagcgcttgcactttaagaagcgtcacacaggcagggaagcaggaagcaggggtgcatgtgcaggcattcacagggtctgccccgccccgccctgccctgctctggaggacgggagcaggggactggacagcatgagttttctctgttcacctacattctctgggctaggcttgaagggagccaggaagagaaagaaaagcagaaagggagaaaagtatgtagtgatctggagtggaggccaggctcacctccctgtggctcacctcttagcctccttgagaggcaggtattctcatttgaagtgaggagccagtcctggcagaacctaaagcggaacccaggtttgtggaggtagcttgtctttctgggcactgcagctctcccaggctggttcttcctggcaggcccattaagaaatggctgggacaaggagagctctaggctgagaacctgaagtccctgaggttcttggtttctctgtacactcacctctatctaagaccttggcagactcctcaggctctgcatcattgaacataatgggggtgttttcctcaaatgcctgtcagggttggtctgaggcacagagagaatgagatagggagtgatgctttttgtgaagtggccaaatgtggcagaaacactttgtttcccatattattctggcttgttagtgcctgcccaacaagtaaaggggaaccctaattacgaacagtagacatgaaaggcagaagcttattaagttgtggcttactttctcttccatcccaccctctgttcatgcaggtacaaacaaatttgaggcctcaattggaagagcaacatgggccacccctgctgggtacccaacttatgagcaagagaatggaagcttccatcacagggagaggcaaagcctcctgatctaactggtctagccccaagctacattgccactaaggaagggtacagaaaactctatgggaaggggctgctgagcaccaagcatgggaacatggcagacttcaaggcctgagctctgggaactgcaatcagaaggaatgggctgaaagcagaaaggaaggacaggttcagactcttgcttgtttggattccaaggcctggaaaaggtgcatctctccttcccatgttaaattataaacctctgtaattatcctgtacctatgagggatttcaccttgtttcaaaggtgctgggcctctctctctctctgtttctgtctctgtgtctgtctctgtctatgaactattctttctgtatttctccaagtaggaccctgttgatctatcctccactcgatcctgttgataactcagccactttgaagcattagtgctgcctttgcagagtcaaggcttggatggggtacgggagctgtcataagtactaaatgtaggggaacttgctctcgggctcttgaccgtgtccaccctcagagcccagtaccttccttgcctcactcttaagatgcctcagtggatgaagacatcagggtcagtttggtgaagactaaggtgttgtatacaactgcaaatgccagtgtgaattaagcactgggtgctcaagtcatgacagctgtcctttaagaacaaacaggaagtggctatgggaagaacttaaccctgaacataggtgccaagtttagcaagaaatgaagataccactggaaacatctgcgtaactgctactgagcagttgctaggagacaccttgcagccaccctctgcctggtgttctgatgccccttccttccgctcttgagtcctggttcacgacatgccaggctgactcctggcatttccgcctgacctctaagctgcccatcagcaccaatacagatttcctttgccaactgtgccactgcttatccttggtagggcctggcatagcagcagccatggggctcgtgaggggcagtaaagcattgtcacatgaacaacaaagattggtgttctggggctgcgacagctgtctttcccagagggcattgctcatgacattgataacactgtgcaatccagcaggagcctagacccccatacaagatacatccattgcatttactaggatgttgtgtcagtcagtgtgttagctagatacactggcctcagcaataaaatataaagctcacttgcctggttctcactttagtcctgcaggaagcagtcagtcaggcacatcttatcctcaggacctggtacagggcaggggctggcacatggtagtctgctcagtgttcacaaatccctcaagaccagaaagactgaccttatgtggaaaggacagactttaaggcaaagctgtgttacttctgtaggccactagatggtgatagcatcccgtagtagagtccagggcaggcagggttgctattccttcctctgcagagaaggaagactctgctttcctgacacagcctcttgagagatcagtgtgggaggagtggttctaggaggtcttctctatctcagcctcattacttaccacattcttcctgtctcctcatctacacaggggaataacattgctcaaggcatgggactggtgtgaagggagataagtgttagtcacacttgctgctcttgtctcctttgcagagaagacagactatgaaaatagaaacaacacaagctacaaagcaatgacctcagttgagggctacatcattcattagttcagacctgatgcgacaggactggtgggcagggccagtaggggcgatcctggtggcttcacgtgtgacagtatttgaaggaagaatccaagggccttggatgatcaatatgaaaaggcagtgagaagcagaagacagaagaagctaatataaatcttgtcatgctgtcctatgctgggataaggaccagagcatggacacacgcacacatgcactccaggcaggcaagagagtcattagaaagcttcaaaagatttgtgagagcccagagccaggcttcaaaaatgaaggcttaggctggaggtgtaagaagagggttggagaaaaccccaaaggctgaggatcaccacccccatggaccgttctgcactcgcttgccaggccaggttctctgcaccctcctcatccccccaacacgccagctctgcgcacagtttgttcactagaggcctggtacctgtcttctctcaggcctctgcactcacacggggctaatgcaggaacattaccttaattagttattcatttaatttaacttcacatttggtctcaattaagcttaaaatgttcttccttatagatgctacaatagcacgtgtaattaaaaggcaataactctttgtgtttctcctttagagacccactgggaggctgggctagtgtgtatgaggagtggcaggtgggaagtagctggaagggaaagagcctcttgtagagctgagaattttaaggcttcactgaaggagtgaggaaggacctaaacatgggaccagacagagggtggggagggccgctgcagggagccatgagacctagacaaagcaaccgaccttgtccacgaggctatgggaataagggaggtttgggggtggaaggaggccatccttacagctaagaaatggaaccctatatcctgtagaaggtgtaatgcctcccccccccccccagactgtctacaccctaattcttagatcccataaatatattgtgctacatgataaacgagacttcttgagatgggttgtcaactgagcccaggataactacaaggctctcatgaatgacagtgaggcaggggtggaaaacagtggaagatgttacattgctgatttctgaatgcagaaagggctcatcaaccctggaatgtgagggacttctagaagctaaagaatgcaaataggtcctcccctagaatctctcctacagtattgtccttagccctgtgagacagtaagataatacatgtgcattgttctaagccatgtgaagtttgtaatgttttacagcagcaatagcaaactcatacgcatcattagtgcaaaacaggcatgaccgacttacagtcagaagcatagaaaaactggagctcccagtgctgggaagctggctcagtgggtaaaatgcttgccgggtaagcatgaggacccgagtttgactcccagaacacgctcgaagaagaaaagtatgggggcaagttaattgtccagcactcgagaggcagaaacaggaagatagtaagctccagacagtgagaatttacctaagacaaacaaaaatcaagatggatggcatctgacaatgacacctgaggttaacttatggcctccacatgcatacatatccaccaggcatgtgcacgtgcatgagccaaaaacctcaaagattaacaggtatacaggggtggccacatagcaccgagtacagcagcatccttaccatccttttagaaataactctaaaggggatgtgccctcttttggctgctgcacagtgccccaatcagagctcatcaatgacatcatctttaagtatacttcaactactttaacccccactcctgcccaattccaggcttcctccccacaatcaacagctccttctaggggtttctctcaagtggatctgtgtggcctgaatttggtccctttaatcctgtttgtaccttacagacacatagtgtaatataagtgttaggagcttgaacactgagccaaactgcttcacttccaaccttgactcctgaatccccctgttgaatgattcccccagtctgtacctgttgtatcaagtggagacacaaacaagacccacttaatagatctgatacatggtgacataagcgtttacagtgcgctttgagaatacctggcatctttgctgcacgtaataaagactgtcttgtctgcacgtatgacatatgcttattcccaggcttggggttggggttaaagggtcagttctatcagctataaaaagtcctttccagtcctaaactgtcacattccactcagggtaatcaacaagtttccagattattttctgtatctaattctcgcatctggttaagccaatggctggactgacacatttatcatttgttcttatcagtgttagtagttctaaagaatttttacctttacagatatgagtgagagaaatggtgagtgcaaacagctaaccagtggaaaactaaggagttgcttgaaagcaaaagttgatctttaaggtatgagatgaaaatgaatggaagaggagttagtgctggcgcttcaagtctgagaggcactactactgtgaacttgcaaccccgtcttttcctctgcctgtttcccatctgtgaaataacagcacatttctttgcacgctgggaatcaaatagaaacaccttgcttcttcagcgatgggactgagttgataggaaaggttagagcttgaagaatagaacaggaaactcatcactgtattagaataaaaacacttggtgtacccgggatgcctccaccctgatccctccattgcctttctccatcagcacacatctactgggcattcatcggtgttgaagtgcagatgtgttgtttacatggaggaagcactgtgctctcagtgcctgtgcgctgatacaatccttctggtgcattttaacattaactttctgaaaccactgatcagaaaggaatcaagtttttctacccaattaccagtgagaaatttttaagttgcttatcaaaatattaatatgcttggctggtttgagacacttctaaaatattacacggtatcgcttaactgactggacaaacattctaccgtaatggagctgggagggtattgctggtcttcgctgccaggccactatcctgcagcgctatccaaggacttgttctctcacacagtggagaatccacgatttctggacagtgaatgaacagtacaacctgccctgttgagagaatggctaatggagcctgagatgatctgggttgagggataacgctaagctagccctgtctccaggcatttgtttagccttccacttctgtacttttgttgttcttgttatttgtctttgaggttgggcatgattaccttgactatgaaaaatgagagttatcatttcctctcaccatactagataagaactgtggaaggcaaaccaagatgaaatacttgatatggtgtgtgtacattgtataaagtcagctcttaatacataagcctgtgacatcaatttaaaaaaattggataacaatgatatctggggagatatttagtttctttcacttttaccaaaattcctctctctgtagataactaaaatctcacagatactagctactggttttatagaccattttggttttataggttttaaagatttatttaataattatatatatatgaatgctctgtcctcatatacaccagaagagggaatcagatcccattgcagatggttgtgagccaccatgtggttgctgggaattgaactcaggacccttggaagaccaggcaagccatccatctctttagccctgcttttgtatgtttttatttttaagctcaaggacaactttattacaatttaaaagaaaacctccaggccaggcaagctgttgatcccaggagttgcctggaggaggaaaatgcagaaggaaaagctttgtggtaccagcattcatccaggcctggcagctggtaccgcatagcagggaggccagtggttttagggaaagagtaaggaagcccaaactatcagaaaaagcatgcttgggttctggccaacatctggaagaaagagaaaaaaataaataaaaagttgcctctttctgagtcagtatttagaaaggtaagcagacctacctaagtgtggtatctcattaaaaggataattattccagccactcttaaatatagttaaagtgagcctgctgtcctagtgtggtcccttggccaggtggttgacctggccaactagtctgttaggtccctactcgggccagaaattccattctcttgaccagttcaccctcagcgggcctttattgttactgtaacattactcctctgaagctttgccttcatccctctgatttaggtaaccctaaatcatttaggagctagatcagggatcaaggccctctccccaccccaccccccacccccaacacttttggtattttttggtctttagttggatacctttacaaaggaatgagaaagacagattcatggtcaggaacctatatgagccttgccagaaaacttcttgagaggaagcacatggcagtctgtgcctgtcagggttggtgctccacttgggaagtgctccactttacaggaaggctcacaggtccctggaagcttttgtgccctgaggagaataaacctgagctctagactgcccacctccctcacagtttccacacgctctcctctcccttacattctcagaacatttctctatttctttgccatgagtcctagctcggactaagaatcaatttcctttgaaggtttctgaatgacagttcatctggaaagtttcccccaagttatgcagataaagaagccagttcaagtggaaggcaactgtatctggcccttgctagccgtgactcccagtagacattggtttcagcctcttatctttaggctgagctccaatgacatggtagaagtgggcttttctttctctttctttctttctttctttctttctttctttctttctttctttctttctttctttctttctttctctctctctctctctctccctccctccnnnnnnnnnnnnnnnnnnnnnnnnnnnnnnnnnnnnnnnnnnnnnnnnnnnnnnnnnnnnnnnnnnnnnnnnnnnnnnnnnnnnnnnnnnnnnnnttctttctttttttctttctttctttctttctttctttctttctttctttctttctccttccttctttcttctttttttggggtagggtggggtttcaggacagggtttctctgagtagccctggctgtcctggaatttactctgtagaccaggctggtctcaaactcagaaatggacttttctgtactccatcaacggtatcaaggagagataggaaagagaagtggccctaacctctctcaagttcccaaccagggggtcacaaatcctagagcaacaggtctcaacctgagtgttgtgaccctttgggggtcaaatgaccccttcacgcaagtaggatatcacatatcctgtatatcagatatttacattaaaattcataaccaacaaaattacagttatgaagtagcaacgaaaataatttcatggttggggtttaccacaacacgaggagctggattaaggggttgcagcatcagaagagttgagaatccactggtatagaaggttttcttctattgtgagagagactggcttctgccacatctgggtttgccaactggctgctgtgtgaagcctgggagagttcatcaccttaaacttcaagatttttctacttaaaagtaagaacaacaataataaattgttataaaacttaagtctcaaaggaattgctacagcccaggcatcggatggcactaacacctttcctgcttgttctcctggctctcagactcctcttcacattgctctggaaagacaaggtagcacttccaaagcagaaccagactcgaccctccaccccagttagtgacaaatttaattgatctgggaagttagacaaatgtgaagttatacaacaatgctgagaatacacactccttagtaattctagagaagatttccaagatgaaaacacagaggcagacatgtggggcacatctgtaatcctagtacccaagaaacctgaggcagaaggagccagagttcatatcagctctgggtccctagtgagaccttggaaccaaccaactaaccaattgacaagaagataaaaagagccaggcctgatggttcaggcctaaaatcccagctacttgggaaactaaggcaggatggcaagtttagagcctgtctgggctacagagaaatttccaggccagcctggaaaacagagcaattgttcttcaagacacaatgtaagtagagggataggatggtcgagtatgtgtacaaggacctgggatcaatctgtagaactgctgtaggacaaaaggaaaagaaaaaagaaagggccaaagcccaaagtggactcatacagaatactcaatacttaaataaggcacccagaggccaccaaatttgggagaaaaaggacccaagatacatggcaggaaggcatctaacatttccatacctcccttctaatctctaagcaaacactaaatgtaaacataacaaagctgcagccaggggcttgaagagcaagccctttggtagctgtttattgctttattagaattcaggcaagggccacacactgtctttacagagctctgtggaactgcacataaggaatggtcaataaccgctgcctaatgcatcttccatactatctcattaaagcaattttgtgtttgtatgcctctctcttccaaatggttccaaatactcaactgagaacttataatttatacgttattaaaaagggccggcttcttctgttggataacaaagcccaaaactccttttccccaaatctactacccacagcttgattgaacaatgtacccaaagcagatcactgttactactgttcattcaaaacagacagaaatcctgcatatgggttccgagaagacagctgtacctgtctcgatggtgacaatttacatccatggactcggctttgccactgagtttctggaggccagggctcaggaggtttgccttagtgacaaatagttatccctctggtctgaagacatgaaggtggtcaggctccagactgcctttgcgctcatccgtgatgtcaacatgtcccgtgtttccgttactatgctcagcaggacctcagtggtttggcatagattggctccagcaaatgatgagtaagaagcaggaagaggcctccaagaaagacagcactgaggaaagccagcaggacatagcggccgatgaaaaaggcgtccacaatctggagaaagaaaacatcaaaacggaatcgtttgccactccagcgccctgcctgtgtgaacctgatggctgtgcccagagtttctttgtaacttcaagtagcatcctgctctggattccttctgcatttcaataagaaaactttcagcttcctaagcagaaaatgcaaggttttctcagaaaaagaggaggaggaggaggtggtggtagtgaaggaggagaactaagaggaggaagagcaacaacaactaataataataaggagcaggaaacaaatggctcaatttaggggaaagagtagctttcagaatgaggtgaccctgaagctttcaccagaaaagttctgaaccctaattgcaagggagtgagggaaagtggccacttatctaagatattaaagcactaaacgggtatggaacttgccccatcatacagttggttgcctagtaaccagtcatatgggaagccctaattctactggtctttgttgacaaaaatctgtatctggtattggctctgcccagacgtctgctatctacttccaaggcacagagctctgttctccccaaagctaagcagcggtgcttaaataggtagggaaagcaggtatcgtaaaccaaatgagtgcctaacttatttcacagaaactatgagaagccatttcttggagagattcccaaatacctgacagtaatgatcacagcctaaagaagggcccagagatcctaatccctagagcctgtgaattcatggattgcatgactaagtggagttaagattgtgacctggaagtaggccaattagcttggattattccatccagggaggcccaatgttaagagtccttaaaagctaaagacatgctggaggcagaggtgggaggatctccactgtaattcagaccagccaaggttacacagtaagaccttgtctcaagacacaaaacagaatgaaagaagcagcagaaaatacgttcaggaaagagatgtgagatggacacagtagagaggtgacacactgctggctgtgcagatggccatagacggaagccatgggccaggcactgggaacagcctttatagctagaagtcagcaagtgggcattctttcagaaccgctggaaagatgcacagcactgcccacccttggatatagcttgggagattggtgctggactgctaactcacacaactgtagataataaatctacagtagaaaccattatgccagcaggaatttgttacagcagcaacagaaagctaatacagtatagatgcacaaactacttgaataatctaagcagtggtaagggtgagatccaaagacatcaagaagaaggctgcggccaccccagctgctccagagactaccccaacagtcaacttacaaccaaggtcagtttgataaaacagctttaacataactttgaccttggctctggtactgaacaagtctctcgcgggctacatgtttgctcgctcgactgtttcactttttaattagccaattagcaggccttgggtgcagaaggcccaggccatgtattattgatacactattgagccaggctgctgcaggggccagctctcagaacctgaaaacgaaaactccgattctgcaggccatgctgacaaacatattttgctcaatcccgactgtctcctgagtctgaaactcatgtgacagaagagagagattgatttggaaaggatgcttgctttgtgccttttctaggagtcacatctgcgataattacaaatatggcagtgtgtatcactcttttctcctaaaaacaaagaaactggggtaggccagttgcagagaagagcctgacacccatgggaataactcctggaatctgtggtaagcataatttcccttagagttttcagagctaattttcttcctctcgctgtcattagtcttaagtagagctggaagtgtgtgttcattttactttaaaaaattatgtcacttttgtggactatatcaaattgacaatctctcaggtctggaaaatggcctttgatattctattgagttccaacaagtgtgatggtttttggggggtgagggggtgtgattttttgagaca

SEQ ID NO: 786 - DNA, 3111 bp, Mus musculus
actcaagactgctggtttctgactaggagagaaagttcgagaaaacagatggcagtacatagaaaacagtggctagtgagcacagagggatagctaggacttgcactcggcgcgacctagagggcaggccggtcatgttcaaggggcggaggctctggccatgggcctgcctggggcgggccagtcggcggggcatttaaatcgctgccgccgctggccgggacgcgcgccggctctgcaccctccatagtctcagcttcgagtgccggcgcctcaagatgcggtcctccctggctcctggtgtctggttccttcgcgccttctctagggacagctggttccgtggcttcatcctgctgctcaccttcctcatttatgcctgttatcacatgtccagaaagcccatcagcatcgtcaagagccgcctgcaccagaactgctcagagatggtcagacctgttaatgacacccacgatctcaatgataccacctggtgcagctggagtccattcgacaaagatgactacaaggagttactaggagctgtggacaatgccttcctagtggcttatgccattggcatgtttattagtggaatctttggggagcggctgcccctgcgttactacctctcggctggaatggtgctaagtggcctattcacctccctctttggcctggggtacttctggaatatccacatgctctggtactttgtgctcatccagatctgcaacgggcttgtgcagactacaggctggccatctgtggtgacctgtgttggcaactggtttgggaagggaaagcggggattcatcatgggcatctggaactctcacacatctgtgggcaacattctgggctctctgattgctggagtctgggtgaaccagcactggggcctgtcattcatcgtgcctggcattatcactgctatcatgggtgtcatcaccttcctctttcttattgaatatccagaagatgtggactgtacccctcctcggcatcatgatgacccggagaaggaacaggacaaccctgaggatcctgtgaatagtccctacagcagcagggagagtaatgtggacattgcagccagctcctccaaggagcagggccctgagcctgaagccatcagtttcctgggggcactcagaattccgggagtgatcgagttctctttatgtctgctctttgccaagttggtcagctatacctttctctactggctgcccttgtacatcttcaatgtggctcactttagtgccaaggaggctggggacctatccacgctttttgatgttggtggcatcataggtggcatcatggcagggctcatcagcgactacaccaatagcagggccaccacttgctgcatcatgctgatcttggctgctcccatgatgttcctgtacaactacattggccagaatgggataaccagttccatagtgatgttaattatctgtggggtcctggtcaatggcccttacgcactcatcacgacagcggtctctgctgacctgggcacacatgagagcctgaagggtaacgccaaggccctctccactgtcacggccattatcgacggcactggttccataggtgcggctctggggcccctactggccgggctcatttccccgacaggctggaacaatgtgttctacatgctcatctctgccgacgtcttggcttgcttgctcctctgcaggttggtgtacaaagagatcctggcctggaagacggcctgcggcagaagcagtgggtacaaacaaatttgaggcctcaattggaagagcaacatgggccacccctgctgggtacccaacttatgagcaagagaatggaagcttccatcacagggagaggcaaagcctcctgatctaactggtctagccccaagctacattgccactaaggaagggtacagaaaactctatgggaaggggctgctgagcaccaagcatgggaacatggcagacttcaaggcctgagctctgggaactgcaatcagaaggaatgggctgaaagcagaaaggaaggacaggttcagactcttgcttgtttggattccaaggcctggaaaaggtgcatctctccttcccatgttaaattataaacctctgtaattatcctgtacctatgagggatttcaccttgtttcaaaggtgctgggcctctctctctctctgtttctgtctctgtgtctgtctctgtctatgaactattctttctgtatttctccaagtaggaccctgttgatctatcctccactcgatcctgttgataactcagccactttgaagcattagtgctgcctttgcagagtcaaggcttggatggggtacgggagctgtcataagtactaaatgtaggggaacttgctctcgggctcttgaccgtgtccaccctcagagcccagtaccttccttgcctcactcttaagatgcctcagtggatgaagacatcagggtcagtttggtgaagactaaggtgttgtatacaactgcaaatgccagtgtgaattaagcactgggtgctcaagtcatgacagctgtcctttaagaacaaacaggaagtggctatgggaagaacttaaccctgaacataggtgccaagtttagcaagaaatgaagataccactggaaacatctgcgtaactgctactgagcagttgctaggagacaccttgcagccaccctctgcctggtgttctgatgccccttccttccgctcttgagtcctggttcacgacatgccaggctgactcctggcatttccgcctgacctctaagctgcccatcagcaccaatacagatttcctttgccaactgtgccactgcttatccttggtagggcctggcatagcagcagccatggggctcgtgaggggcagtaaagcattgtcacatgaacaacaaagattggtgttctggggctgcgacagctgtctttcccagagggcattgctcatgacattgataacactgtgcaatccagcaggagcctagacccccatacaagatacatccattgcatttactaggatgttgtgtcagtcagtgtgttagctagatacactggcctcagcaataaaatataaagctc

SEQ ID NO: 787 - protein, 527 aa, Mus musculus
IAAAAGRDARRLCTLHSLSFECRRLKMRSSLAPGVWFLRAFSRDSWFRGFILLLTFLIYACYHMSRKPISIVKSRLHQNCSEMVRPVNDTHDLNDTTWCSWSPFDKDDYKELLGAVDNAFLVAYAIGMFISGIFGERLPLRYYLSAGMVLSGLFTSLFGLGYFWNIHMLWYFVLIQICNGLVQTTGWPSVVTCVGNWFGKGKRGFIMGIWNSHTSVGNILGSLIAGVWVNQHWGLSFIVPGIITAIMGVITFLFLIEYPEDVDCTPPRHHDDPEKEQDNPEDPVNSPYSSRESNVDIAASSSKEQGPEPEAISFLGALRIPGVIEFSLCLLFAKLVSYTFLYWLPLYIFNVAHFSAKEAGDLSTLFDVGGIIGGIMAGLISDYTNSRATTCCIMLILAAPMMFLYNYIGQNGITSSIVMLIICGVLVNGPYALITTAVSADLGTHESLKGNAKALSTVTAIIDGTGSIGAALGPLLAGLISPTGWNNVFYMLISADVLACLLLCRLVYKEILAWKTACGRSSGYKQI

SEQ ID NO: 788 - DNA, 43853 bp, Homo sapiens
tgctctgtgaatatgtatttttatatgtattacattttctgaacccctgacctacctcttccttttcactattagcaaaatagaaatgtagagatgaatagctgttaatacagcttagtttgactccagaagtaggatataattggatccatatcactactacctggcccactgaggcagcaggaatagggaatttattcaggttgtggtatagcatgtggtatatagttctgctgtatgacacacaggaagtgggttgtgatgctcatttcaagacacattgctttggatccatgagccacttatcccagttaccatcacacctcatgcttctgtgtttcccaggagcctttcttcagttgaatagttgggactgtaagccttgccaggtaggatggtagacagattcactgggattggttccaagttgggtattgcccctgcatgaatcacacgggactgagtctggcctctccttggggactctaaaagctggctaggtccattaccatgagagtcccttaggattaacaggccttttgtttgcctgaaatattcttcaaattctgagtcttaaaattctaataactcttaaggcaaagtactagtagcatctgtctgtgaacacttaacctgatttctctcactcggaagcaattattcctgcccaattatatagtatactagttgtaactatttagcatataggttttctgaattatatgataatgtttatatatcttaaaagataattttcataaaaaggtaagatcatgactcatacagatataaaaatgaacgtgcattaaacatttaattcatgagggaaataagtagatgtttcaactggttccaagaaaaaaggaaaaaaatgcacaaatttatatagataaaagaatgttggattggatgtgcaaatggaggcaaaactgatgtttttcatatttatctacagtttgcagaattgttaaaccaaggagaactttaggctaaaatcaggtcactttggaggggtgtcctctagacaatacattattttccactgaaacataaatttttttctacatcctctcccatttcgatcaaaatagtctgaaagaaagactatgcttgatcacaaaataaggccggtctcattggattggatctaactataagtacggtaagcattttaatttaccacaaaagtctccttcagtttacattgctggaagttttcataaggaatttcagatttaacttttaaaatacttgttaactggactgtgtatttgttcatagtgcatctgttttcaacgtgattggattgttaaattttgaggtgtgtgtgtgtgtgtgtgtgtgtgtgtgtgtgcgtgccttaaatttcattctgtgcagtagacgaggacttgataagacaataacatgaaagaaactgaagtgttttctggcttttctagagatatctgggcatgtccatttctctctagctgaaactctgttatcataaactaggaagtacttgtttcaattcattactaagaagggggagaaaaggtttagtaacagtgatcagaaaatactggacaagctgaacatggtggctctcacctgtcatcccaaggctgaggggggaggatgacttgaggccaggggtagagaccagcctgggcaacatagcgaggcccctatctctaaaaaggcaaaaataaaaaaaaaaattaattgggcatgatggtacattcctgtagttccagctacccaggaggctgagatgagaggatcacttgagcccaggacttcgaggctgcagtgagctatgatagcaccactgccctccagcctaggtggcagagaaagatcctgtctctaaaacaaattattttaattaaaaaaaaggaaagaaaatagaaattactaaggcatgctttggcatacagtgaacatttggatgttaattttgaagaaagaaacatttgggcttgagaatgagtttctaagaaggtagagtggatcagcactcttttcccagaaatttccatcttgatcttgattcctgactcttgtagcctgttcttcgtatattttacaataaggaatgccaacagtgtactaggagccagggctctcaggctagtgttacagagttgtagggaaattctaggatgaagtttttgctgggacaaagcagatgaaagagttgagtttttccagatctggagcttacctgttggggatgctgtagacatctagaggcagcagggatatcttcagtctttattgtgtagtgctggtttgtttattcagaccttctttaatcttactaataaaactcttcacttgaagacctttcagtccttgcctgtgaaaggcatgattgttcttcttgaagtcacatgcttttgatttctaaacccatttccattttcatttgttcaacctgttctccctgtttcattcctcttgcttcacgatgttacaataagaatgcattcctagttgtagacctaaggagcagtgtaaggcagggaggcattcccacaacttccttgagcctatcttaggcttaattaagcctatcataggcttaattggtcacagggacagaggttagtcccaaatgataagaaggaatctgtttctacaaatggagtggcccttggggagagcttctgtctcatctttccaccagcatcactgtgtgaaccaggcatgtctgttctctgcaagttaaatttgtttgtctgagtagtagggaggagtattatctcctagccgtctagaggtgccgatgaagctgttcgataaaagcagagttacacgtttaaaaaaatagctcaacatcgctgatcactaaaaaaatgcaaatcaaaaccacaatgagataccatctcatgccagtcagaatggctattattaaaatgtcaaaaaacaacagatgctggcaagattgcagagaaaaaaagaacgcttttgcactgctgatgggagtataaattagttcaaccattgtggaagacagtatggcaattcctcaaagacctacagacagaaataccatttgacccagcaatcccattactaggtatatacccaaaggaatataaatcattctattataaagatacatgcacaggtatgttcattgtagcactattcacaatagcaaaggcatgaaatcaacccaaatgcccatcaatgatagactggataaagaaaatttggtacatacgcactatggaatactatgcagccataaaaaggaacaagatcatgtcctttgcaggaacatggatggagctggaggccattatcctcagcaaactaatgcaggaacagaaacccaaacactgcatgttctcacttacaagtgggagctgaatgatgagaacacagggacacatggcaagaacaacacacactggggcctgtcagaggcggggtgggggctgggggtggcactggctgggtgtggagggagaacaccagggggaatagctgggcttaatccttaggtgaggggatgatctgtacagcaaaccaccatggcacacatttacctatgtaacaaccttgcacatccttcacatgtacccctgagcttaaaagttgaagaaaaaaaacgagtatcgtaacttggaatccaaggcacagtactgaaatctgtattgctagtgaggtacttgagttaatatgggcagctgaccatgctgctccatagcatattctccaaaggaaagatttctacttaaaaagtaaatttctcccatcctgtttctggaattagaaaactgagaactactaaaaggaaattaaagttgacagagcttttatatatataagacttttataaactaaggatagattcacggggagttacaaaaacagttcagaggcgtcctggtacctcttacctagttttccccagtgattacatttgacataaccgtagtacagtatgtgtgtgtctgctattttatcacatgcattgatttgcgtaaacaccaatgcaaacaaaatacagaactattctgtcaccacaaagacctcccttgtgttacccctataaagttacacccctctcaaccaccaccttccttaactccagtccatctctaatcccttttccatttttatgattttgtcatgttgagattgttatataaatgaaatcatacagtatgtgaccttttgagattgattttttttcacttggcataatgccattatgtcaatagttcatttctttttattgttgagtagtatttcatggtatgaatgtaccacaatttgtttaactttattgaggggcatattggttgtttccagttttttgttattatagataaagctgctatggacaattcatgtacaggtttttgtatggatggaaattttcagttatctgggataaaagcccaggagcacaataagtgtatggtaagtgtattttagtttcttaggaaagtgacagcatgtatttgggtaatgttttttatctactctgccaggggtggcggggggtgaaagtccaggtttcctatttgacctctgttaacatccctggttcggggaggcagggcagggcacctcattactgcttgaaagggtgggagttctggctctccactaggcctccattgatatcgccctgtatgggctccttactgctccccatgtgacctccatgacaccttggtggttggggtggggcgctctttaccattggaaggtggtgaaagtcctgctttcccacttggagttctctgacaccagccaggcggtgggcgggggggcacccctcattacagccaggtgcaagtggaagtctaggttccccactggcctttgctgataaggtggggtggggctgcagtgttttctatgaggtttagttggagcagggtggttattgccacgctaccccttccttggtcctgtggctagacagagccagcatttctgagagctttggtgttctgtctgtgtcattggtgcttctggatttgctggcttcttcagcacccagtccgggatatatgaagccaagagcaaacccagataactcaccactgtctttccttagatctcaaggtccctcgctgatctgtcttctctccacttttcagagttttcttatgcttgctttatatataatgtcaatggtttttaacggtacctagcaagaagaatagagagaagtgtatctcttctatcttcatccagaactggaagtctgacaaagccctgttaaatggccatttctcctctgaaaacataaatctgatcctgtcttcacccttaaagctgtcttatagcacccaactgtctaaagaatacagttccaacctgttattgttgacattgaaggttcttcactatctcaccacatgtaataagtcatatcttctgcagctccccaccttgcacatgtactcaccagctacaaagaatgtcttatgcaccatttcttcaatgtaccatgctttttcatggttccttattttgcacatgcaattttccggttccacctttctcctcttcacttggtatgcactaagctgttcttcaaatctagttcttatgttgtctacagtaagccttctgagactctcctggagttatttgatcagtgccaccatatcagcatgaacattttcttgtttatataacctatttcttgtttgagttgatctcttctgccaagcttttgaagtgggattatctctatacatctctgtcccctttgactgtaaattctttgggattagggactgtgtctgtctgttttttttttttttttttttttttgagacggagtcttgctctgtcgcccaggctggagtgcagtggcgcgatcttggctcactgcaagctccaccctctgggttcacgccattctcctgcctcagcctcccgagtagctgggactacagtcacccgccaccacacctggctaattttttttttatacttttttttttagtagagatggggtttcaccgtgttagccaggatggtctcgatcgacctggtgatctgcccaccttagcctcccaaagtgctgggattacaggtgtgagccaccgtgcctggcctgtctttttcattaatgtatcctcagcacatagcactgtgcttggcacatagttgtcacttaacaaatgtttgtttgtttgtttatttatttattgagacggagtcttgctgtgtctcccaggctggagtgcagtggcacgatctcggctcactgaaacctctgcctcctgggttcaagcgattctgctgcctcagcctcctgagtagctgggattacaggcgtgtgccagcatgtctggctaatttttgtatttttagaagaggagggtttcatcttgttggccatgctggttttgaactcctgacctcaggtgatcctcccgccttggcctcccaaagtgctgggattacaggcaacaaatatttattaagcaagtaaatgaatggttactttcagatactagaacaactaaacattgtccccagctgtgtgaccaggctgagactacctcacttttgtcattaccatatattccttttaatttttcctctaaacaaggtgactttgggaaattttcataatttaaccatttcttcatccttctcctctcttcctaaggactactggctgtcaggctgtctttgtatatacctgttgtcactactggtatcctaaggaggttgaccatttgaaagcagggctgccctgttggttgactgataggtctccaaagcccactcttcaggccattatgaaccatcaatctagtcttcagtacattgaaaccctacttttggccagttatataagggctgggatgttctttgctaagcattccagaagtttgacttctattgagaaataagatatttttgaatacctttggtcaccttgcttatctatcttttgactgttagctgggaagaatttagtagtaattcttagtgagatttcagcatccaacatatttaagacaataacttctttcatttttatgacactctactcaagccatacatacatccttgtgaaccccaaattattcagcacgtattaccacaaagcttacaataactcagtgggttaagttgtatatatatacacacatacacagatacacacacaagcacattatattaaggattttgcagtcaaaaatatattttgttatacccattgatcctttttaagaattttgatcctttaacccctatattttgttctcatttatgacagtcattggtttctgtcagctgcagtcaatatctgaccctaataccatatatattagctcctgcacacataattgctccatttgcaaaacctatttaatatggccaggcactgttgtactttttgtatgcacatatgttttgattcttacagcactctgtaaggtgggtgctgttacacacattttacagaggagggaactgaggcttagtgaagtagtaagtatcttgaccaggcttggttctgactccaagccaatgttctttttactgcaccactccgcctctccatcaaaaggcctactatgaaattgaatatttaaaagattgaataattacaatttatcctaatatcccagttcttacccccttgatcaagactggtcttgattgtattaccaaaaaatatgcttttctctgtttagtaagacaggagtggaaggaggcaaatgtgttcaaaaaatgatgcttgtggatgtgttaaaattttggagttctgttacctagtggcttattctcatgtcatttgtcctcaaagactttcttaagcattcagatccttctgtccctttgaagaaaacagggaagacacttgttatcgtgtcttaaagggcataaaacaccaactggctaccccaacagtcctgtgggtggtcatggaacttactagcagtagggactggtatttgatgggtaaaatggcttctttctcacaagtgtctcatactgaaccataggaagcatttttgacagagtataaggctatccatataagaactgaggatcttttcctttagcatttgattgagtagctccttccctccctctttatttccttcagatcctctccacattctgcagggtttgaggaggtagtgtgtgggaggggggccagataataacaagaaggtgagtcgagagtggtgaggttgtgtaggtgagtgaagggactccctgaggcacaatatccctctttgtcactcccccaagcagcaggaagcacagagatcatccagctcaccaacaggagcgagcaagaaagagttccaacattggtgggagtgttcccactgccaccctggcccctgaacagggatacgtggctggaattcacaggaagtaactgtgacaaggcaaagtctgtttcagtaccggccctgctcccagctacttggtgcactgtgaacaatagccgtactaccatgagggcatattcctaatgcctttcttagagtcccagcctcagataggcatggtcccctgtgaggcaggaacacagcttcctgacaaatgagcaggagtgacccttattcttggcttctgtctgaaatggaaagacagatgttccacactgctgaagtctggacagcacctctgaagccctggagatggtctcttccattcctctggtgatgtccacctactcctcaaatgtagcatcaaggaacttcagctgcttccttggctcaactggattccaattttatccttccctttagtccctcagaaataagcagcgtaggaataattcccttcctggggatatcagctcattcctctagtttatttgctgccccttaaaggagtaccttaacctggggtacctgtgattattgaccctagaatgggtccatcatagattctgggacagcaggtgtctcctgggattgtcccaggcaaaccaggacataaagtcaccttacctaggtgggtaatagccacctaactgacttgtaagagtgaaatgaatatacccccaagtacagtgagtggtctaatcaggggtttgatttagtgaattgccgctaatgacactggtcctttggtgtttcaagcctctgcaccctatttgggcctcccttctacttattgcctttcttcttttctctattcctttaccttttgtcgttggcgtgttaccgtcttcatttctgccactagacctatgccccctgactgcctgggattaacagaggcttttacaactctgcttaccctctttttcttgattctagggctggtacgagccaagcccattattctaggtcctaatctgtttggtggagttgttactccacttctctgaccttgcgcgtagggcctgggcactcctaggaattaggggcagggtggggttagggctgaaacccatttgctccgacactcctgttttatgttctattaactttattcctcaggggaatacttccctttgcagccttctgtatttcacccttgggttcatgtacaaggatctcacaattatcagtggaaacataccctgaaatcttcaggctagaggcagtcactttcaggaccacagaagtccctgcctggtggctgcttgcctccagaaaggagagcaggagtgactgccacattgtcatggcgggagcgcgtgggggccggtgtctgtgaagccggggaagagtggggtcctgtggaatatgagcagggcaggaagccccagcctgagcctgtggtgtgtttggggccgaatattgtcccccccccgcccccgcccacgaaaaaaactcctgcgctcccagaaggtgagagtaccgagattagtcatgcagggccgctgagtgtgacttccagccctccagcgtctcgtgtcccgcccgtgtcggagcccatggctttttaggacaggaagcgctgcggggtagtgcgggcaggcaggcacgtcacaccggacagcgtcgagattgctgctttcggttccccagcgggtggtgaggcagaaagtgcagggcggaatgaggagccccagcacctcagagctgtcgggcagtggcggggaagcaaagcacaggagcgctgtggtgccagcggccgggctagggacgactggcgggtttgcgctggacccgaccccgagggcgggcgcaagggggcgggcgctgccgtactcaggccgcggggccagggcgggccggccggcggggcatttaaaccccgctgacagccagtccagcccgggacacgcgcccagctctgtagcctcctccgtcgactcagccttaggtaccggtcaggcaaaatgcggtcctccctggctccgggagtctggttcttccgggccttctccagggacagctggtgagcggggcaggggagggaggcgtgctgggacctcctgggctcggggcttgcaggggccgcggggggcctcggagatcaccccagatcggccccggcgtcgccgcgtggccaggggtgctggggggacttggtcccgagctcctccagcggcgcccgcctcggaggttgataaccctccctgcccaactccgcccgcgctcccccagaccccgcgacgctggctcggtgacactggggaagaacaggctgccagggagggtctccatcgtttcccgtttccatcctcccctcctaacacacatccggggcgccttcagagcgcctttctgtcgttgggcagctggggaacctgggctcgaaggctggggaaccgaggccaggggatggtagaggaaaggggttgccactggggtttgtgagtgtccctcttggtctcctttagccctcgaacaccaaggccagaactcagtggtcctgggagctcgtctcgaggcctttcagcacctggaaagggcacagctctcagagcagagcagggcagcccctcggcagtgggagaagggcttcacagaggttctcttcctgaccgcagggaccacatgttgggctgcaaggtggggtggaggggtttcagccactcttccttagaggcggtcaaccattggagcagtccgtttggtctgcacagtttttaaaatattgtgttagttgccattatttacaaatcataaaatttaacaaaaatagctagattccagacttctcttgaacaatagacgacgtggaccgggcatggtggttcatgcttgtaatcccaccactttgggaggccaagatgggagaattacatgaggccaggagttcgagaccagcctggccaacatcgtgagaccacccctccattcccccctcacacccctccctgtctctagaagtaaaaaaaggaaagaaaagaaaaatggatgatgtagcaatactgggcctaaatttccaaattaaatgaataggattgaggagtcccctttagatagggcaggtgctattaaagtggccaatttgtcctggttttgaaacagtcttttgtcggcaaccctctcaatcctgggcaaaatgagacaattggctaccctacacactttttaattgttgagagctctcatcaattctaaccttcttcactcgtttagattatttacctagtcttttttgagttggagactgttaaaagatatttttcagaaaaagattaaaatcctgactctcacaaagacataagaatgaacccatgttaaagattttcttttactcataataaaggaggcagaagatgttataatcggttcaaaagagaatctagagagggggattggggaattattgtttaatgggtatggagtttcagtttgggaacatgaaaaagttctggaaatggatgatggtgatggttgagagacaatgtgaacatacttaatgccacctaaatgtagactaaaaatggttagaatggcaaaatttatgttatgtatattttaccacaattttaaaaagagaatctaaagaacatattcatttataggttaggaatattgagaccaaattggtcttctacaggttgtgagggaagactactgaaattatcttcataggtatattttgcatgacttctcagttacctaccacttcaaagaattttaaaatagctcaaggtcaattaaaagctggaatctgataacctggcggactatgtgctagacaaggcatagttttccacggaaatacattgtttttctacagtctctcctgttttgatttttaagaaaattcttagaaggattattcttgatcacaaaataaagctgatctcattggatttgacttgattgtggctgcaagtgtgttagtttaccatataccccttgttaagttaataaacttagctggaagttttcataaggaatcctagattagattttttaaagcctttaattatttattgtcctgacattagtaagccgagtcaagaaactgtcttcaccaggttttacctactgtactgatgtatttgggcaaattcctcttctcagggtccccataatatcctaaagtttctgggctagccagagagtgaccttccttttggcttgtaaacctggaaacccagtaagcccattttcttgggaggtttttcttagtattggctgcatagagtgaacctcagtttttagaggaggctggttgtatctgattaaataggcatcctgatcaaatacaacatcccggcaaggtcttggttgcataaccaatttttctaattatgtactggtaaaaaaaaaattcttactgaacctgtgcaaataaccatacttccatgaaaagcaagaagattccataagagtttctgaattctgaggagtcaggtagggagaaaaagatatttataagtgtttcatttcagtttatgaaagcagaatctactaagttcttatgggttaatatagcctaagaagaaagagaaaggtcttccttatatgtccagaaaatagaacactatatcaacatcaacagtattctgaacatagaagacagtcatccatccccagttcatgcggtcctgtgtgattaattctgtcccgctgaatcttgggttagcaatctcaaaaacctatctgcttcttgactaaagagttctggaactcctgactcagtccactagtacgttcttaatgttgtctaagtagttccatcagaaacttatatccaagagcaattactcagtacagtgcttttctgagacagtatttggttgttaaagataaaaactctggcctgccaggcccagtggcatgcttacagtcccagctactcaagaggctgaggtgggaggatcccttaagcccaatagtgtgggactgtagtgcaccatgatcatgcctgtgaaaagccagtgcactccagtctgggcaacacagtaagatcccatctctcaaaaaacaaaaatctcccactctattctataactgattacagagcctttaagaagcatcaaagtaaaataaaaactatctgtaggtgacagagacttaaaaattgttgattaacttcttactgataattttcaagaatgaatgatctgatgagaattcatgacaagaataatgcaactgacaaggaaatttggttgcttctgtggtgtgcaaaacaaaaagatgttaatccaaacagaaaaaatctagacaacgtctaaaaatataaggttaatttcaaaaaacacaatgaacatattaatttataaaaatgaacatgatttttacagagaaaaaattttaagatataatatataaaaattctgggatataatttacataaaatgccaagaatatcaactaaagatattcagtaagcttaacataagttctaaatatctgtattttaataaaactgcaaaggaaaggctgatgtacatctccagttgaaaaccagtggcctggaagatgctacatttaaattaaagaaggaaagttgcagcctagtaactattttattttattttattttattttattttattttttcgagacaaagtcttgctctatcacccagattgtagtgcagtggcacgatcatagctcactgcagcctcaaactcctgggctcaagggatcctcttgcctgagcctcctaagtagctgatactacaggcatgcaccaccacacccagctaagttttttatttttgtagagacagggtcttgctatgttgcccaggctggtctcaaactcctggcctaaagccatcctcctacttcatcctcccacctcatcctcccaaagcaccaggattgcagacatgagccaccatgcccagcctccagtaacattttaaataataattgaaatcgtgactagtaacacgtatactgttgttatcggggaaggcaccatcagggtgctgataaatagaaacatgtcatgtacagagagggcattgagaagtctgcacaactcttttatagcatataatttctcaaatatttagataaataataatattttaccaatataaatttaacctagagaaggctgagcatctcttctgacttgacaattatttccaagcaattgatcaatattaacatattaaataaatctaatgatttctagcacctctctttttaaaagatgaaagaacaaatctttgtggttttccaggagcccttcctctttttaaattaaatattcacaaacttatcaagattttgccaactttggcaaaattttaacacatttaattgcttatttttagacttattgtttgatgtactataatccaagacaaatcaaatttcctttctacaaacctaaaatgtatccattcagatttgaccttccctgttccctttcttattctggaacaaccagtcatttttcttatgtgtaatatttttccttttaataaacaaaaacaggtttcaataccatgtatacaaagtcatacctctctgccacgattgttcctagtagagtctcattcatgtatattagttatatcttttaaccaaagtaactaacatttcagagagaatggggagtggggagggtggatcattataaaccatctagaacacattggcattctagaagggctcagtaatacgcataacatgactttctccagcctccaacactcttcactttcacacttctcaaggtgtgaattcagctacggtattccccaacatctctgggatttatgacagaccttggttgaaatcctttcaccactgtgagccttgactttgctgagccccagtttcctcatcaataaaagtcagatgggttcttgaggataaatgcgataatataaggaaacattcttgacgtcttgtggctgctggagggtactcaacaggtatccttttacttccttccagataagtttagatttggattcctatcaaacactaaatgtcacgtagttcttctgtaagtacattattatgctgagctctgaggcctgcaaagacaatcaagacagggttctaccttcttggaactaagaatcaagctggagaggggctgtgtacacacagtcagcaattttagaaggccctgctctacttattgagtgccaaaggatggcatttcctatgtgccatgtcattcagaggaccagcgaggggaatgcagaagtcggttggggagattttgaagaaaactgacttgctgagcacttaacacataaaaggttagagattatatgtatacattgcctggtatacaggaagcatggaatacatggcggcttttactatcattattaatgatggtgatgttattattacagatacatattaacccaattcacctttcttgtgctaaacaaaatacaggccagggtgcagacaaataaaaataaagacttatagtctgaaaatgagaaatcaaatctctgtcacatttaactgctttcacatgtccccaaggagggcatttaagaagtgaagaagacagaataggaagctgaaagtggactggccctgggccttggactcctcctctgtaaaatgaggataataataatacctgtatcacacgagtgttttgaggtttaaatgaggtactacgtgtaaggtacttaggtcagtgccaggctgatatgaaacactgagtaaacactaatgattgactatattctatttgtttttcctactactttgtgccaggcattgtttatttgtaatttttgtggaactgcaaggtgaatgttagcttccctgtggaacatatgagtgtaatgaggcacagagcagttatgtaagcctgtccagcaccacacagctgataaatgactgagctggagttggaatcaagattagtctgactcgtaagcccatggtctttccgctgccttcccaatgatagtgttgggtggggaaaagattacatggccatttggccttggacaaattacttaacatctcccaggctcaatttccttatctatgaaatggaaaaaatgatgtacctatatcacggggttttggtgaaattaaatgagaagctgcttaaagcacttagcccagtgtctagcgtagttggtattggctaggtgcttataaatttctgtggagggagagaatcatctccattaggagaagaaggaagtctttgacttggatctggaggtgttctgagcagaggtcacagagccagcaaaggcatgcaagtggagacatggcctgtcccctgtctctgaagtagtaacatgtagctccagctggtaggaacaaaaggtgcccctggacaggaggctgggagtcatgtggcgccaggtgtgtggagacagctgcagacatccaggcaagagtcagagatggcggagtttctgtccaggaagatgttgctctcctcctcctgttaggccttcctcgtcaggatgacaatgaatggcttgtccatggcgtttcagagccacagagcacctggaggttccccagcctggagcctggctggttcctgccttttgtaccagtgtctgtgtgggtgcgtctgggggcagctggcagcatgggagatgactgtggctggtgcttatggggctgggcccatttcctggggccctctgagggggatggcccagaacgtgcagaagaagagcctgtgggaggaaataccagggtgaccacagctagatgagcaggaatgggcaggagggtgaattgggcaggcaggaagagcaggagctgtgagctcctgtggtgccatttttcccacacctcgatcttcccctgtgagctgcaaaaggccacagctgagctagaatggatggttctgccctgtggagttagctaagggctttcactgccggatcctggtgcccactctgaggaggacgcaggggaaagacattcaaattcatactgagagaaaatctgctgtgtgccagacacttccacatccaggatatctcatttaatctttataacactctcgtgcagcaggggaatatgatcttatttaaaggaagatcgaactgaggcttagagacgtacaacaacttgcccaaggtcacattaagtggcagaaccagaaattaggactcagccaattttgctcgaagtctgatgtctgtttccctgtcctatgggctagctctctcaaatcttactttcctgttgactgcaaagaggtgcatggtaagggcagcagaaagggctgtttaaaatgagctttgatgggaagaggctgcttggaaaaggaaatgagggctcctggggagaacctggagtctcagcccatgatccctactccggccccccagaaggggcatgtgagcctgtggaggtcccatcccccacccctcgtgacagcagcttctcccccagctgctttttgggcttcctcttccaccctgctgtttcctctctccctccctacagtggactggcgtgcacctcattgacctcgggtggggctgtctgactcaggccctgtgggctggtctagaaggtagcagcaaggtttcgaaatagtctgtatggttggccaaggccttgttttttccattcaagcttctgtatcaactgagagctggggtcagggttgacagtcccaaagtaacagcagaattgaggacagacaccagaggtagagtccctgaagcccaggacctcctatctgagtcactaacagacactaagttggtgtgtgtgtggggtgggggggcggtgtcactgctctcctgttggcttctggctcaggtcttgtcccctggacgcttcttgctcaggagaaggaaggccatcctcctccccctctaagcaggactgcagctctgccatcatcaacacgcttccatcagtgctatttacacaacctttcttcagaagagacaccaacttaaaacctgttggctgcctcttctgagccccaccaacactcccaccctccctgttattccggctgctgatcagagtccctgctgcagcgtgaaggctgtcttcattctgcctgaccattcagggtcccccactcagctttcttcccaaagcaaaacaatctatcctgtattttcctctttcctaagacagactgtcatctgagccaccagtctcttctcaaatgtcctgagttcctcgtggctcctggccaatggcttctttctctaggaaggctctcagggcaagccccgagtcatcttgatctctctgagcatgtgcccacgtcccagctggaggaaggacagcaaacagaggattccctgaggggctggctgctgccctgggagagctttgcgcctcccaaagagggtcttgtcctgtcttgtgtgctaaagacctggctcagggctctgcacctgtggtatctgttcctggctggccttttcctagcagggtatctcccagtgctggtggagggcttgtgggggagggggggtgggcactgtcaccattgaccctagcttggttcttactgtgcccagccctctatccttttcagatctgcttagtctcagaacagtcacgtccgagaagagactactgaatccattttctctggacaagtgccaaagtcacctgcagccacagccagcctagcctgggactggggagtgactagggagccactggggaaccggggctgtttctgacatctctcgggggcagcgtccctctgctgggctgtttcttgttttttgctgttgcagtggtggtggcagtcggtcttttgggggttttgtttgtttgtttctaatctgtcactgctttgggacatgccatttcttgatttttaccccagaagcattcctagtgcaaagtctcaacaaggtcaataaagttattatcaggctccttcgaaagagtaggttggactgtcagctaatagttaagagatagctagtcaacctccctatctaacttggttattcagtaaccagtatccggtgggggggaggtgggattctgagaagtgccatctcttgctaacaaggtctttgagggtcatgggacagccgccccatctggagcagccgggggccttcccctccatcctttggtccttggcctacttgcccagcctggcccagcccctgggctgccatccccccgtcacagccaccctggggccagctaggcaaggcctggctgtgcatattctgtgccctgcttctcttctgggacctcttgattcacgagggaaggactggtgagaggagaagtgaaacctgcgggttctaaacatggaaggagtgcgtcagctgcctttctgaagctagcatgagcttggcagtcttggcctccgtctagcctagcccttaacctgaccgaagttcccagtctcctgtgaaccacggcaccttgatctttctcttagaatacctgacaatggggaatggatagagcaccagactcagaggaggcccagctctgactatgccatgcccagcgagtggtgtgactttgagctcatccctccatccctctggaggccaggaaggaagtcccagaaaaggccagtgccaggcctagtgtcacacaacacagctgaggaccccccacccgccaccctcaagactcatgactctcctgctatcttgggtgtcagggtttctactggcagcatcatgggggactccaggtggtggatttcagggagttggggtcagagctggcggggacatcaggctaccacctggaggagggcagggctggaatcttggaacctaccaggtcaggatgcacgtggggacccctactgactttcctgtctgcccacgggagcaggtgggagggccccggggctggagtctcccctgtgtcccaccgtaggctccccaagaagccatagggcccaccatggaaggccagagctccaggagcttcagggcatccttatgttcatctagacccagctatgcacagcgggaggcggggtggagggggacaggctggcagccacatctctaccttccaggtaaatccagggcccggagcctccacttcccagaagagtttggttcagcccctgaccctactcggctcccctaacagagcagtgtgggccgcctccacccctccagtccttcttcctggtctgaacattggaagcacactggctgtcatctaagcgccctctgggcatcaggaacaatttcagactggttaggtgcatctcactaacccatcaataggtctgagaaaggtgatagactctgcttttccaatgagcaaaaagatgtaaggaatgaaaccagcttttgcccgattcccaagtccttgctgttttctcttatagacatcaactccctgacatccaccacctgggttcccccgtgatgctgctatgtccctgggagtggctggcaggatgaaaaaggcccagggaactggccttgagcctcagtgaggaagcctgtctgcgcttcccaccaaaacctacagggcacagccctgggtcttcacctggcttaggctggctggggttcagagctgccgacctgggaactcccgctctcttcagtggcttcccatcaccttcagagatagcctaaatgccacagtttggcacctgaggccctgcgccacgccacctgaggcccctgcccttcccagccagctctgcttctctgcttggctcagtttcaccctacagatacccccactgaggcggagttccccaaacaggtagtgtcatttcacacctccgtgccttcgtgcacgctgcttcctctccctggcagtcctccctgccccagctgtggttgacttggcctcgtcctgcttgtttttgaagcctcagctccaggaatcctttcccgacactgctccctcctgctggctcggagtctctcctctgtgtcatctctgtaagagagagacatcacaccaggtctaactgtctccctgctgacctgtgcgcccaggcaggtggagattccgctcacggattctcttgctagtgctggattgtagcatggtgcctggtacaggatgggcacagggatgcatgggagagcagcctcgcttcagccgaagggaatcaagatgttagaaatgggcacagctcctcctactgaggttgtcggggacagaactccaggcaaaagggccatggagcagataaggaagaacacctggggccacaagcaggggagtcggggagggcgggctggagttgacacagtgcagttgggggagtggggtgggaggggaaagggtgctggcagcaggctgtgcctctgggtccccattggctctgaccagccctgggagggctcagcatgagtgtggaggtgcagtctggcttcctagtcaacaccaggctacggagccagcaagggcttcactgccgagcctgcaatgaaagaacagtcatagctggggccccagtggggccttgggtccctgaggatctttcagacactgaaaggatctgatttgtcaccatggtcagtggccaaacatcatggcagaggccctggcacatccaagtggtcatgaaggctggtcctgctgcctggggggccttaccggcagtataaccagggacctggggactgggggagagtcatgctgtgttctcttatcttgtgggacagctgggactgatactagcgcaatgtgtaactgatgaggaaaccagaggcaaaaaaaaggcttagggattcacgggaggttacacaggcaattagtgagaggtgccacgcaaagcttcccgcctctccctgaaccaggtgcgtcccaggcggggcttggtggctgctgtctgtaggactgcagggttcttccatccattgctctttgcagaaggccagctgggcaccctcttcaaagtctctcagaggatttccctcagattctagaagtccccgaactaagagtcatgagccatatggcaacaggtggaacccggaaaacattgttgccacaagcttgcctatgtcagtcactgtgacaggcacttggagtagccccagcttccctagacaacttgagtccctagaggacctctgtgacccacatgtgtgcctttgggaaccggtggccagagaggccggggcgtggagctgcctgcattccagactacactgttgcaccttcatgctggatgggatggaaaggcactgaaagcgttttagcagagctgtggaggggcaggagcaacttcagtctctcaagaagacagacaggaagctcgatccaggggcaaagtgagaaggagcctcgtagcccaagcccaattcagccttcgctgaaatgcccctttgtttcccaagtggtagtgggtgttgcttcatgccacatttgggggaattgggtctggggtgtggaggaggattcctaggccgagggagcatccagtgtcctgcccttgggctcttggagccaggacagaaagggcttcaggagccctcccaccctttttcctgacccttctccatgaagtcttcagtgagccctgggtctcgcctaactcctggccccttctcctggactggggctccactctgaggcctattttccatgcatgtcctggctcctggctgcggcgaggaagcagatagtgactcagcagggctctggggcccttccccaggcctcaggcttggggagcggccggggcacagtggaaaagctgagtgccacccgcctgcactgttctttccatcccgggccagggcatgggatgagacgtgaggggtgagaaagagcacgtgtgtgagccacagatggaaagaatgggctctgtccagtgggatggacggactgggactaagaagagggctggggtctgtcaccacctgtcccactgccacttcctttccaactaccgcctgcctgaaggaggtgctgtgtctgccctgttcgaagcttcagaggagtgtcaacctcactttaaaaacagacccttctcccgactgtctccctcctacccccatcattttagacatgtgaaaaccactcaaactccctgcccccacctctgccacacacatgcacacacacacaggcgccctgacctcagggaggtcgacaaaaagcagaggtgctgccagctggtcagagcaggcggaggtgcttcttgtgggctggggccgagccggctgcaacagaggcctcaggagttgggaccagggagacaggtccctctgagcaccctggcctctgggcattttttcccagcctccccttggcctctgcaccaagaaggaaagagttggtggtcctcaggccctgggactgccagaggggacacgggtcagggatgccggcccagaacttccagctggggctgacttcccactaacgcagatgctgtcccttcctgcaggttccgaggcctcatcctgctgctgaccttcctaatttacgcctgctatcacatgtccaggaagcctatcagtatcgtcaaggtgaggctggctggcagcaaggaagagtgcagaagcacactgtcgtaaccgtccttaccccttcccatggccaccgaggttgcaccttcacctggcaggctcccactctcagtggctgtcttccccaggagctccttttgagtttattccccaagacagctgtgtcggtggctgtggatggaataagcgtgcaggacccctgggctatgtggatgctgctcatgggtctgatgtggctgctttcccctgcagccagttcctgcaggaggaggtgccagtagcggggacatagaatctggtaggaggcagtgtctccagtatggttggggcaggtggttgcttgctcccctctgggtcaacccctgacctgtatgtcccattgcctatccagagccgtctgcaccagaactgctcggagcagatcaaacccatcaatgatactcacagtctcaatgacaccatgtggtgcagctgggccccatttggtaagaacagggcaagttgctcttcccattccccattccctcttcctcgagaaggggctgtccagggagggcttcctgcaggggcatccacgcagtcagctttctgtttctcccatctgctttcagacaaggacaactataaggagttactagggggcgtggacaacgccttcctcatcgcctatgccatcggcatgttcatcaggtaaggacagaggctgagcctatgaccaagaggaggatggtttagagctgctacctccccttaaggaacctgggggcagctgggaatgagcccagggatgctgcatgtacaatccacccacagccatcctccttgccttaccgcggtcgcagagactgctccttcgcctggtagactcccactggtagcagctcttttgcctggaaatgttctcctggatgctgcttttgagtctattcactcagataccacagttggtgggtatggactaggaccctttaagaatggccctgcgtgcacatatatctgggagaatccccatcctctgctgtgtccaaaccagcacgggaagcatgctgttccttgccaggaatccacgatcaataaggctgcatactgcctccaaagagctcacaggccagtgggggcaatggatgcattggcagctggtgctaaaactgtggcggctccatgacagaggtggccatcatgtgttctaggagctccgaggtcattactcagtccaagctgagctagagcagaggggtcggggatgcttcttggatgagatggtgcctgacctgatgcaagggacttgggtgcggcggtgcagatggagacctgggcagaaggaatagcacgagcaagtagggcaaatgtgaagaaacagcatgatctacgggaggaaccgcgggcaggtgtatggagggaatgacagtgtaaggaaggtagcagcagggctgagggctgaggtcatttgcacatgaggtccatgggcagagacgcatggaagggttttcgccagggcgtcccatccagatgagcatttctgagagctcactctgagagtgatgctgaggtggatgagactggtcatacagagtgaccaatttgacagtagcccaagctgttgagcttatgttactacagtggtgatagaggtggaaagaggctatgtactggagcactagctaagaggtagcccggtgagtcttggagactgaatgtgaggggtggggaggaaaggtgggaggctgagggagctctgagcctggcttgagtgcccaaggggtggcattcactcagatgaggatagcaggatgatgaaggcgtcagggtggttggtgggaagaggaagaggaattcagcttaagagcactgggtttatttaaatgccccgggggcatccaaataaagatgtccaggaggcacctgtctgtgactgtgaagctctgggagacagatcaggcctgaagatatgcatgtgatgcctgtggagctatttagcctatgggtggttgtggcaatggtgaaagtgttgcaaaagaccgcaccgagaggaaaacgcacgacacgaggggccggccaagcggaggaagatgggaaagctaaattcatggagcatggccaggtgtcacagaagcagtgggggacagaggttggccccgtcacatggcaacacagaagtcattggtgggaccttggccagagccacttcctagcgtggtgggggcagaaacatggtagggagttgaggtggacacagaggagcttaaccgcagatccaactttctcttccccagtggggtttttggggagcggcttccgctccgttactacctctcagctggaatgctgctcagtggccttttcacctcgctctttggcctgggatatttctggaacatccacgagctctggtactttgtggtcatccaggtatgaatcaccgtcttgcacttgggcctgtgttgccgtctcgggaaggacctgggagaccgcagctcacagcgggtgggagcctgtgttcctggctccctgtccagtgctctctattacactgcactgagttctacctcctggccccactgcccccgcatttgttcactcagagagttggccttgagcacaacgctgtggtcacttccaatgcacgagaggcttggtctctgcttgaacaatcttgagcgagagaagccagctcatgccattgaggaggtgtggcatgtgtgtaagggaagggtaaggtttgtagtgtggggtatggagggccccttggccacgaaattgaacctcctcagcccagggtggtcagagcagggagccagtcgcacagcccaggcctgttcccaccctcccttctctctccctgcaggtctgtaatggactcgtccagaccacaggctggccctctgtggtgacctgtgttggcaactggttcgggaaggggaagtgagtgtaacaagggaggaggagtgggaaggattgggagggctgggggtcctgagctggtcaccgtggcctctgatgtaatttcagagggaagggtcagaaagcggcctccacgttgctgttcacgtgcttagaagtggctaaaagcagtgctgattttctcactgatgaggctttaacccatagagcaggcaaccttagttatgtttttttctaataatagattaatttctattttcaacgaagacaaaaagaagcctataaaacttccgccctgccccccaaccccgaccccgaattggcttgtgtgcaaaacaaagttgctttggagaaggagttctcacccttggcactactgactttctgggctattggacccttgtttggggactgtcctaccactgcaggctgtttagtagtagccttcctggcatctgctcactggatgccatagcacaccctgagctgtgaccatgaaaaatctctagctgttaccagatatcccttgggggtaggatcacccctggttgaggacagtgctttagagtgagatcgtgggacagaagagaagaacgagggccggggcccccatgccctcagtgtggctagagctcccatcggcactcactcagggagctgggcaggcggagcgagaccacaggccctgcagccacctgcttgacaccatccaaggtctcccactccttgctgacttggggctttggggctgtctttggtgcctcggggaagctgtagtcagcccagctttagagcttggctggggcagttgctatgaacaatgtgctttgctttttactttttatacctcttcccttctctccctcccttccaggcgggggttcatcatgggcatctggaattcccacacatctgtgggcaacatcctgggctccctgatcgccggcatctgggtgaacgggcagtggggcctgtcgttcatcgtgcctggcatcattactgccgtcatgggcgtcatcaccttcctcttcctcatcgaacgtgagtgggcccctcactccccacaagtgagcctagaagttctcggtttctgggagaaggcagctggatctactggaaagattgctggtcacagagtgggaggaccagccgtgtgactttggacaatctttcagagcctttattttctcatttgtaaaataataatagtaataataatgtctatttcgtaggatttctgcaggcttaactgagacaccatagttaaaatgccaggcccacaggaggtgcttggcaagcattggttgaatctgagaggtgtgatcagggagggtggagttgaagggacattgttacagtgaccaggctctccacttgctgcaggtggtcttgtgcactagccaggccaggtatgagagccactctgtagctaagagtactaaagtccaagaggcagtagtgacactgctggttgttaggaaagccaggcctagaaagctgtctcctgagccccaggccccgctccctcctgctgggacacacactggccaccttaggagctggaggcggggctggttcccgggatggcttagatccagtgcaaggtgagggcctggcaatcacctcgggattgggggggcgggggttgggaaacttcttagaaagcgatttttttttctagacccagaagatgtggactgcgcccctcctcagcaccacgtgagtgtgagccctcccagccctatccctgccctccaactccatccagagggctggacccggagaggcctggggagctagagcagggagttctggccctcactgacctcacggacccagtgctaggcccatgggttggccctacagcctgatgagtctggcaggtcagtccagcccgagacgaacgtgtgcctccccatcctgggagccagtgtctcttgcctgggctgcaccttcagctggtgggaggcagcacatggacgcacccacagcagggctcatctcctctgctcagggtgagccagctgagaaccaggacaaccctgaggaccctgggaacagtccctgctctatcagggagagcggccttgagactgtggccaaatgctccaaggggccatgcgaagagcctgctgccatcagcttctttggggcgctccggatcccagtaagaagtttgtggaatggaggaaagagaggggctttccagattttttctgttggtgatgaggagatggggtgcttgggtgatctatttttctagaacttctttataggggaggtgtaagttgggcagcctgcttggggagggcagtgtgggagatttgtcttgaaacaaccttgcacagtggtcatgttgcttttattgggactggatgtgttggaggctgccttgtgtggcaggtgatggaaagtactggggtggtgctgagcaccccttggggccaccactgaacccaggacctctggaccccttcccatgtgccccctgttgcactccccagggcgtggtcgagttctctctgtgtctgctgtttgccaagctggtcagttacaccttcctctactggctgcccctctacatcgccaatgtgggtaagtccaagagaaggggaatgaaggggtctctgaggaggccaaggctgcctctggtgggagaggaagcccgtcgtggtgatgcctgtgattccagtatataggcagaattcctgctgaacctctcctagagtgaaaggagcttgatttagttctttacttaaatgaaagctaaacccagcaaactaccccctagaccctgactccagccaccttttctccccttggaactgagctgggggttaggaactcagagctctgttctgcaattcttgctatcttcttctctagcccttagtgtaggagaaaccccctccaggctgcttggctcataggtggtagcattggaggtgctagggaaggcctgcctgctagatctctcccccagcccaaggaagagggcctggtgagcgaccccactccttgtagcctggtggtgaccctggtggtcttctccccgtgggacctaatgtgatcgatgcccctgtgcctggatctgctgggctgcactggtgttctgtcctgtctcatggacctactcccgtctgctcctgcccagggatgtatagatgagaagagctcatttgaaaaaggatgtttcatgtccacctggcctgggtctctgcttttccataggtcaggctgctctaccaaacagcagcccaccccgccctgcccagcccccaggagcctccaagctccaccagggctgagggcctgtcacccagtactgctgccctccctcccagccctggggaggaacaacagtgccttgccacacattgtgctcgctctgaacaggatactgtaggaattagtcatggccaagttcaagccatagcttgccccgcagctctgtcggggcctctctcgtgacagtgtggagcactagggcagctttgtggacaccgtgactctttgttttgtggccttggtgctgacttcagagtatgaggcaccctcgagggtggggctacaatctcagcttctggacattccttttttaaaacatggagccaaggcctgtgacctgaggcccctgtgtccctgcaagtctccttcctggctctgtgtatgagcacagcctaaggtaaacgggaagagttcctagtgctgctagggccggagtgaagcagagaaagggctgggctgagcttcaggttgcgctccaggggaaaggtggccacgggacagcaggctcgggggccagatcccagagcttgccagggagggcttgttctgagaggtgaaggtcatcctgcaggggaagagggcaacacaggacgggaccaagagggcgtctatccaaactgctgcattctcaccctgtggccctggccagcctgctccacaggtccccagctcttcctcggaaaagggggcagtggtctggatcacgctctgcagggcttctagctgtgacactccaggatgtttgccccaaaccccaggtctgaccacatacctgtattttccacagctcactttagtgccaaggaggctggggacctgtctacactcttcgatgttggtggcatcataggtgaggccttgccctgctctgccagcaggctcccttcccctcttttcttgtggggtgcaggaagaagggacaggtccgatgggctatgacctgggtaggtggcaccagaggaaaaatggctcctgggtttattctcagctctgatcctgcctggctgggtgggcctaagaaagatgcccttttgtttggtctccagtagtgatgggcactacaggaaggggagggctgtggaaaaagcagctctgctggttcttgctgacaggcccaggccagcactggggcacagctggggtgccaggcgaggggatggcagggtcctgtctgggagtcagtgcgtgagtggctgtgtgttccaggcggcatcgtggcagggctcgtctctgactacaccaatggcagggccaccacttgctgtgtcatgctcatcttggctgcccccatggtgcgtataaccccgagggtgaagtgcgaatgcatgtgagcaggagcctgtgtgggcctctggcctatgtgcacgtccacgcgttacacacattgatgtcgctgtgtacgcgtgcacatgcatcattgtgcacacacgggggaggagaagcgagggtcagcagaggcaccttggaaaaagagccagactgcagactttagagggggattcatgactctttggccttggtagaggagaccgcctcctaaacttcttgatcaaggaaagaagagattgaggttgaatctgagagaagactgtttggagaaagggagatgatagagtaccacgttttagaccgtccatccctgggacatttaaagaccagagaaatctgcataggcaggggaaaaggaataggatgccctctggggtttcagggcaggagatggttgttccagacctcagggctccaggccagcaaagggattccgggtgactctgcctctcccctctcctctctcagatgttcctgtacaactacattggccaggacgggattgccagctccataggtgaggaggaggttgcaagtcctgccaggccaggggaaaggcactgccttgggggccccatgaggctggcccacggggggcactgacaggtggaggggctgggagggctgaaggctggagagtgctcctgccttggggttggggctgcgggtggtgctgcttctctgactggctgtctctatgctgtcccagtgatgctgatcatctgtgggggcctggtcaatggcccatacgcgctcatcaccactgctgtctctgctgatctggtgagtggggccacctcccgagggccagggaccgttctgggggcttggtcagggccaccatctccaggtccatttctccctgtctcccatcccgcagaggagaaaccgtcaaagtccttcagaacgcaccatgggcccctctcctctcaagcccaaaccccagttaccaccttccctgagtcagcccctctcctgtcctggttctgctcatgctgctgctcagctgggcttccccactccactgtctctctccaggggactcacaagagcctgaagggcaacgccaaagccctgtccacggtcacggccatcattgacggcaccggctccataggtctgtgactctagctctgttgtgggccggcccctaggcatagtgccctccggtgggcaggggaggtgcaggacccctgctcacgaggctgtgctccattcaggtgcggctctggggcctctgctggctgggctcatctcccccacgggctggaacaatgtcttctacatgctcatctctgccgacgtcctagcctgcttggtaagagtcttggggtacacagataggtattgagggatgctctgtcctgccagactggaaccctggaggtccaaagcgttggccatttggggttctggggcaatgagagcagctgccctttgctcagaagcactctccctcccccgagtgaccccttgccaagtggcagcgtgtctctcccccttctccactgccagtccacgggtcaccctggtgctgggcactcagtgctcagtgctaacagtgccctcccttccctctgtgccttgtgctccacagctcctttgccggttagtatacaaagagatcttggcctggaaggtgtccctgagcagaggcagcgggtgagtccggggagctgaagctgcccctctaccaacctcatttctcgtgggaatcagcccagcgctcagtttctccaaacgcaggctgaggctcgaccagcccagacctgaggagcactgagccagtccctgggtggccctcaccctgctaacctgtcctctgttgtccccgtgtatctctatagctctagtatggtcctaacccaccagtgatagtattttcctcaagtcccatgacttttgtgagtatttacttcgagtctgtgactcgagtgccatttgagtgggggctgcatgcaaatcctctgtcctgcagtatgactttttccaactttctctttcttcttgtgggccagttgtaaagactttcaacctcagcagagtatggtgcttgggaagtgttttccaaggggtctgagatgccacagaggttggtggcctcttccctgagggacagtgtgagaactttggacatgccctcggggacagaggaggcagaaatagggaaaccagtttccctctgagctgcgactgagctgcaagtgcctcctgaagttcagaaaccaaggtcatctggcccctctgcctggggtatgcagaacaaaagcaactaccaatcaaagtctctgaaacaaatgtgaatcaagcatgggtggctggcctggtgtgctctctgcctactgtctggtggtggtggatgtggtggtggcatcagcaggtcagtggctgaggctacacagtgctggtggtctgatggtcgggcgaccctctcccgctggccgtcctgagcaggagcctcgtgctaacaaggaggccgctaatgagctggccggagctgtggacctgggctggatggcaaatgtgaggaggaacccccgggacatggtaaccagcacgcatctggggacacacttccacttaaggaagacaccacccaggggagagaaagtgagagcaggaagacacacaacacaggaagcacgcagagcacctgtcctgccctgccctgccctgccctggaagaggggagcagggggctggactgcatgacccaaagttcctgtgcctgtgctccttggagccaggcctgagggtgggaagggaagaagagcagcagaaagcgaggaggatttagtgagcaactgctctgtcctggaattgtgtctggctttagacgtgtgagcttgcctcgcagcagcctctcattgaaggtgagagacagaggctcagagctcgggcacagcctaacactgaaactgggcctggggtttgtttgcttttctctggactgccaccgctgtcccaggctggtcctgctccatgggaggcctgtgtgtgaggtgtgcagtgatttatcagagcagacagagcactgtgcttggaatccaaaaacccctggacagtcctgctttctccactcactccatgagaccttgggcatagcactccatcagacccagattctctgaaccaccacatctttatgtatgaatggggatgcttatccctgaatacctggcagaattgacccaaggctgagataaatgggatatgtgatattgctttgtaaagctgtcaaatgtggcatgaacattgtaaggttttatttaatttcttttttttttttttttgaggcggagttttgctcttattgcccaggctggagtgcagtggtgtgatctcagctcactgcaatctccgcctcccaggttcaagtgattctcctgcctcagcctcccgagtagctgggaccacaggcatgcgccaccacgcccggctaattttgtatttttagtagagacagggtttctccatgttggtcaggctggtcttgaactcccgacctcaggtgactcacccgcctcggcctcccaaagtgctgggattacaggtgtgagccaccgcgcccggccaggttttaaatattaatctagcttgctatttcctgcctgagaggtgaaagggaggcctcattacagagaactgagatgaaagcaatgatgaagggaccctgggaccctgcctttcctctccctactcagcaggagcttatgaagtcatctcactttctcttctgtcccccctctcctcttcatgcaggtataaagaaatatgaggccccaattggaacagcagcatggagggtcccagttgggtccccaacgtgctccccatgggcaagacaatggaaacttccacaagcagggaaggcaaaccctctttattgaacattagccagcccagcccagaccccagggctgcctaaggacacagagattctccatgggaaggggactgccaagcatgaggaaatagaagattcaggggcctgagctctggaagctgcaagcaaaagggatgggactagggctgagttgtgtctccattttgataaggaaaggatatgctcagactcttgcttgttcagattccaagacagaaggcttcacaaggccaacgcctggaaaatgggcatctctccttcccatgttaagctttaacctctgtaatctgcctgtatctataggtgggcatctcactccaccaaaggagcccagcctctctttgtccctctatccatgcaacagtcttctctgtgcatttccccaagctgggccctcttctactctccatttaggcctgttgataactccattacccgcccatcactgctgttcctccagggccagcactcgggcgaggcaggggagctgccttcggtacataatttgaaggggcactccctcttgggcacatgccggccctgagtgcctcccttgcctcactctgatcctggccccataatgtcctcagtggaaggtgatgggggccggtgctgtggggagagtagaaagaggggttggcatgactaaaaataccagtatgtgtattaagtattttgagaatgaaatgccaaggagtgcctactatatgccagctctaggaatggagtagacagtggacacaagaaggacttacgccctgagcacaggtgccaatggtgacaagactggcaagacgtgagggcatgaatggttcattcaggcagctgctgcagatgtggtcacctggtgccatctgctgctcccttttccacttttctatgtcctccttccaccccaagtcccggatcactcgctgttttctggctagctcttggcatctccatctgagcctaaagttgcccactggcaccaatagattctgtttgacctgctgtgcccatgctcatctttgtcggggcttggcttggcagcgagcgaggctggcatggggtgctgaagtggggtctcagtgaggggtgacagcgtgctggcagtcctcacagccctcgctcgctctcggcgcctcctctgcctgggctcccactttggcggcacttgaggagcccttcagcccaccgctgcactgtggggagcccctttctgggctggccaaggccagagcaggctccctcagcttgcagggaggtgtggagcgagaggcgcgagcgggaaccggggctgcatgcagcgcttgcgggccagctggagttccgggtgggcatgggcttggcgggcctgcactcggagcagccggccggcccttccggccccgggcagtgagggacttggcacccgggccagcggctgcagagggtgtactgggtcccccagcagtgccggcccacctgcgctgtgcttgatttctcgctgggccttagctgccttcccgcggggcagggctcgggacctgcagcccgccgtgcctgagcctcccacccgctccatgggctcctgtggggcccgagcctccccgacgagtaccaccccctgctccagggcgcccagtcccatcgaccacccaagggctgaggagtgcgagcgcacggcgcgggactggcaggcagctccacctgcagccccggtgcgggatccactaggtgaagccagctgggctcctgagtctgatggggacgtggagagtccttatgtcctgctcagggattgtaaacacaccaatcagcaccctgtgtttagctcaaggtttgtgagtgcaccagtcgacactctgtatctagctgctctggtggggcctcggagaaacctttatatctagctcagggattgtaaatacacccatcggcactgtgtatctagctcaaggtttataaacacaccaatcaacaccctgtgtctagctcagggtttgtgagtgcaccaatcaacactctgtatctagctgctctggtggggccttggagaacctgtgtgtcgaaactctgtatctaactaatctgatggggacgtggagaacctttgtatctagctcagggattgtaaacgcaccaatcaacgacctgtcaaaacaggccactcggctctaccaataagcaggatgtgggtggggccagataagagaataaaagcaggctgcccgagccagcattggcaactcgctcgggtccccttccacgctgtgggagctttgttctttgcaataaatcttgctactgctcactctttgagtccacgctgcttttatgagctgtaacactcaccgcgaagatctgcagcttcactcctgagcccagcgagaccacgagcccaccgggaagaacgaacaactccagacgcgctgccttaagagccgtaacactcactgtgaaggtctgcagcttcactcttgagccagcgagaccacgaacccactagaaggaagaaactccgaacacatctgaacatcagaaggaacaaactccagacgtgccaccttaagagctgtaacactcactgcgagggtccgcggcctcattcttgaagtcagtgagaccaagaacccaccaattccggacacaccaggaccaccaagtgggtaggttaaagctcatgacagtgggcactcctgaaggggatgctcatgatattgatgatgtgtgggcaaatggggagcttagagcgccacgcaagataaaagccttgcatttcctgggacgttgtgggctggtgcattagccagatacacacccttccacactgaagcaggctgcacagcgccaatggcaacaaacaaggaaggctcctcctgcctgcagtcacttcagctctgagcgcaggagtcagccagggacctccaagtcctcagcccacaggggcaagagctatactctggccttatgttcagcattcaggaaagctgctctctgctgctctttgacattgagaatgaaatgaaattagttattcatttaacttcacatttggtctcaattaagctcaaaatgttcttccttagagatgctccaatagcacttgtaattaaggagtttaaggagaagctgtgttgcttatatgagccactagatggtgacccaatcccatcatacagcccagggtgggctgtggttccatcctgcttcctggaagagagacaggagccgaggcctcttgacttttcagactttcagcttgctttctgcttcagagggcaggggaagaggaatggttctctcaaggtcttctcttccccaactgcactgcttactaactttaagcctgtttcatcatcaggaaaatggtgacattatctacctcataggattggtatgaagggagacacatactcaacacactcctgcccttgaagaacttgtctagttaggggataaataggaaaacacacggagacagtgactccaggtgagagctatgctgttcattagtccagccatgcaggaacacggctggcagaagggcaattccgggggcaacgggaagagtccttcttccttatgaaggcagaattctgaggacttggatgactcatttgataaggtagtgaggggtaatggaagagggaggaagttaacatgaatacttatccaactcctaggatgttaggccttagagactgaaactgaacaaatggcattggctcctaccagcaggtaagtgtggcactagacacatgcaaaaggcattgtgcgagctcagggtctggcctcagaaatgaggacttaggctgtgggtagggagttggaaaaaatactgaaggttgggggaaccccagcactgagatctgcctgtctgcacccatctcccaggtcccaggttactggccctgtttgggcagctctgggcgcagcctgttcaccacaggcctggtacctgccttctccctgggcctcagcactcactcacacggggctaatgtaggagcattacgttaattagttattcatttaatttaacttcacatttggtctcaattaagcttaaaatgttcttccttatagatgctacaatagcacttgtaattaaaaagcagtaactctttgtgtttctcccttagaaatccactgggaggctgggcgagtgtgtgtggggtggctgggggaggaggaggaggaggcaagaggcaaagaaaagaaagggaaagaagctcttggtcggtcctagcaccatgaggccaccactaagactgaggctggcaggaggaactcaacacatcctgggtgtctgagtgggggtgggagagttgctgttgggaatcctgagaagtgacaaaggagcagacctcctactgaaaggtgtgggggtagggaggatggcagatgggggtggaaggaggcaatgcttaggggagaaggggccctatattctgtgataggtacaatgtgcccccataagatgtccacatcctaattttcagaaccagtgagtgttaccttacatggcaaatgagattttgtatatgtgattaaggatcttgagatggaaagactgatggggtggacccagtggaatcaaagggctccggatgaatcacagagggaggcaggagtgttggggattggcagatgctgctctgctgaccttgaagactgaggaagggtccaccagccagggggacgggggcggcctctagaaggtagaaaaggcaaggaaatgggttctctcgaggctccaaagcctttcctttaccccctgaaacccatttctggtttctgacctccggagcgataaatgtgaattgatcaaaaccagtaagtctatggcaatctgttacaacagtaataggaaattgataatattcccagtgtaaaactggggtatgaccaatttaacggcaggaaaataaccacaggcaaacaaaagaaatctccaaagcttaaaacaagtgaaggggctggcctcatagcatttaggcacagcataagggctactgtgtgaccacctcacccaagagttctccaagggcaggacttggaccaaatgcacagactatatcatctctggcatgatgtgatgtaaaccattaaaaacacactttctcattctgtctgtggcactgagcctgatttcgatcccagctctcatttctttggtggcaggaaactgagaaaagagggtggggggggtagggactcagaattttttttttttttttttttttttgcataaacagtcaccaccaataatctgctagggacagagatcaagtagaaaacaaaacaaaaattcctggtgtgtggctttgattctgccattggcacctctgaaaactggcccaagtctcaacattccagctggatggtgcttacaagagaggcggcagtgttctcaaaacttgaaaatatagtctactagcagctcagctgtttagtatctctgagcaaggggacaaccaaagtctaacagcagagacctgccagaaaccctgggctaatgggtgaagctatctctgaggcctgcgtgcctgttcacgcttttccccagactcctgctcaattcctaagattctggtttttccaccagactcagctacttttccttggtatttctgtcaagtggatttgcattgcctgcccttgtccctccttttccttcgagtttatcctatggagcaacgctctataacagacagtagtcaggctcttagactctagagccaaactgcctgactttggatcctgactcctgtttacgcctaccagcccgtgcctgttccccatctgtgaagtggggatattaagagtacctacttcatagggccgatatgaagaagacataatacttacaacacacttagaaaaatgcctagcacatgtttgctaaatgtaacaaaaattgttattttgacatgtggaaccctagacttatttccaagtattgggatggaactagagattaaaggttgaactttatgaactataaaatctcttccaatcctgagttcttatgcttctatgaggataatcaacacttttctagattcgtttccatacagttctgattctcacatctggaaattcatttctatgtaacagccagatacttaaaggtttaagcaaaggaattatgattgaatgtttgttattcatactaaaatgatcattagaatcctttaatgaaacttttacctttttggatatgtgttaagaaaatgtcaggtacaaacagctaagaaacagtattaaccaatgtaaaaataaggagttacttgaaagtcaaaagtgatctttcaactatttgagaaatgagatgtcaggaatcctgatgtcaagttggagccccacttctaattaactgtgaaactttttaaatcccttgtcctctctgcctgtttctcatctgtaaaataatcacagcaggtttctttacacattgagcaaaaaataaaccagaaacacttcaactgcaacaaccatgaaatagagttgatactaaagtttctgttaaataacagaacaaaaaatggattgctttatgttagaataaaaacatttaaaaataaattggatgccctccttccaggaagcagtgaggaagacagtctagacaccttacagcctagttcttccatgggcttactccaccaggactagtgctttacaccctacgggcacacaatatatgctgaatgaatggcaggattcgagaatgaatggctatgtactccctagtccctggacattggtatggtaattctgatgcagttttacattaaatttacattgtacacaaagaatggtagctttacttccatttttatcagtgaaaaatttaaggaacttaacaaattacccattgtgatctccattgtggggatagggtggtatcctcctaattcagcttttgtcaggatacaattttaagacgccacgaaataacctattttcttatatagaaacccagatttactctccctctccaccttctaaacagtggggatcaccagtctgccacaggatcccctctgggtagggaacagtagagggaacatgttctaaggccactgatcacagaatggttctgaacactaagatgacttctgtctgtatttaaggaatgacctctgagccctgtctccaagaaggccatgagcatacagggtaccataacagacattgactatagggttatcccatgccaaactctcagtgaaatccattttgagccctctcagccttctacgtcttatcccaaccctgcggggctttttttgcataactgcattgagtatgcaggtagaaagaaatctatcattcatttcaccacagctggtaattatagactccaggtctgtagactgtaggtcaagtcaagctgaaataaactttgcacagggtatttttttttttttcctaaagccaatctttaacatatatgcctttcatttacatcaggcaaaaaaacaaaaattagaaaacagtagtattaaggatagaatttagtttccaaccttaatacactttcctccatctaaatagtcacccaaaacctcatagttattatccattgatctaatagttgaataacttttggggggaataaaaaagatggattcatggtcaggaacctataagagttttcccagagttacttttttagcaaggctctcagaagaaggtaacaattggcagcttgtgcttgttaggagccaagcttccacttgggctgcagggagactcacaatagcatgaggcccccagcttgtctcaattccctcaagacttatgcattcttttttctctccctcaatctgcttagaggatgtttcttcttttcttacctgtgtgccctaggccagattaggaaactatttcctttgaagttttctgtacaaagccttatctgcaaagtttttccaaactaagtaagataaaggaaatggttcaatgtagggataactatacctggccctcaccagcccatgactctcagtggttacctgttctctcttcttggaatttagagcttagttgcctgtggggtggcaggactgggtaacttctctaccctgaaaacagaattgaggagagaaagtgaaggaacagtgtggccttaacctacctgaagctctcaatcagagttccacaaaccctagtgtgttttctctctgagacaagccctggggcctaccacacctgggtttgcacactggctgttaggtgaaggttgggcaagtcagctgatctctttaagcttccattttttctactttaaagtggggatgataaaaatgagaccgttgtaaaaattaaataaattaaacctcaaaggaattagtgtgctattggcatagagcacatactccatcagtgatctctttccaacttgttttcttggttcttaattttaagccagaagattctttttcaaatggctctagggagtcaggatcagacttccaaagtggaacctgaccagggcccctccatttaatgcaaatttcatttggtctgggagatcagacaggtatagagttatatctgatgttgagaatataccttcctcactagctttggagaaagggctacaaagatgaaaagtgaagacaccccaaaatggactcatggtaattaaataaggcacacacagcccaccacatcatggaagaaaaaaacctacagata

SEQ ID NO: 789 - DNA, 2096 bp, Homo sapiens
gaaagtgcagggcggaatgaggagccccagcacctcagagctgtcgggcagtggcggggaagcaaagcacaggagcgctgtggtgccagcggccgggctagggacgactggcgggtttgcgctggacccgaccccgagggcgggcgcaagggggcgggcgctgccgtactcaggccgcggggccagggcgggccggccggcggggcatttaaaccccgctgacagccagtccagcccgggacacgcgcccagctctgtagcctcctccgtcgactcagccttaggtaccggtcaggcaaaatgcggtcctccctggctccgggagtctggttcttccgggccttctccagggacagctggttccgaggcctcatcctgctgctgaccttcctaatttacgcctgctatcacatgtccaggaagcctatcagtatcgtcaagagccgtctgcaccagaactgctcggagcagatcaaacccatcaatgatactcacagtctcaatgacaccatgtggtgcagctgggccccatttgacaaggacaactataaggagttactagggggcgtggacaacgccttcctcatcgcctatgccatcggcatgttcatcagtggggtttttggggagcggcttccgctccgttactacctctcagctggaatgctgctcagtggccttttcacctcgctctttggcctgggatatttctggaacatccacgagctctggtactttgtggtcatccaggtctgtaatggactcgtccagaccacaggctggccctctgtggtgacctgtgttggcaactggttcgggaaggggaagcgggggttcatcatgggcatctggaattcccacacatctgtgggcaacatcctgggctccctgatcgccggcatctgggtgaacgggcagtggggcctgtcgttcatcgtgcctggcatcattactgccgtcatgggcgtcatcaccttcctcttcctcatcgaacacccagaagatgtggactgcgcccctcctcagcaccacggtgagccagctgagaaccaggacaaccctgaggaccctgggaacagtccctgctctatcagggagagcggccttgagactgtggccaaatgctccaaggggccatgcgaagagcctgctgccatcagcttctttggggcgctccggatcccaggcgtggtcgagttctctctgtgtctgctgtttgccaagctggtcagttacaccttcctctactggctgcccctctacatcgccaatgtggctcactttagtgccaaggaggctggggacctgtctacactcttcgatgttggtggcatcataggcggcatcgtggcagggctcgtctctgactacaccaatggcagggccaccacttgctgtgtcatgctcatcttggctgcccccatgatgttcctgtacaactacattggccaggacgggattgccagctccatagtgatgctgatcatctgtgggggcctggtcaatggcccatacgcgctcatcaccactgctgtctctgctgatctggggactcacaagagcctgaagggcaacgccaaagccctgtccacggtcacggccatcattgacggcaccggctccataggtgcggctctggggcctctgctggctgggctcatctcccccacgggctggaacaatgtcttctacatgctcatctctgccgacgtcctagcctgcttgctcctttgccggttagtatacaaagagatcttggcctggaaggtgtccctgagcagaggcagcgggtatgcagaacaaaagcaactaccaatcaaagtctctgaaacaaatgtgaatcaagcatgggtggctggcctggtgtgctctctgcctactgtctggtggtggtggatgtggtggtggcatcagcaggtcagtggctgaggctacacagtgctggtggtctgatggtcgggcgaccctctcccgctggccgtcctgagcaggagcctcgtgctaacaaggaggccgctaatgagctggccggagctgtggacctgggctggatggcaaatgtgaggaggaacccccgggacatggtaaccagcacg

SEQ ID NO: 790 - protein, 542 aa, Homo sapiens
MRSSLAPGVWFFRAFSRDSWFRGLILLLTFLIYACYHMSRKPISIVKSRLHQNCSEQIKPINDTHSLNDTMWCSWAPFDKDNYKELLGGVDNAFLIAYAIGMFISGVFGERLPLRYYLSAGMLLSGLFTSLFGLGYFWNIHELWYFVVIQVCNGLVQTTGWPSVVTCVGNWFGKGKRGFIMGIWNSHTSVGNILGSLIAGIWVNGQWGLSFIVPGIITAVMGVITFLFLIEHPEDVDCAPPQHHGEPAENQDNPEDPGNSPCSIRESGLETVAKCSKGPCEEPAAISFFGALRIPGVVEFSLCLLFAKLVSYTFLYWLPLYIANVAHFSAKEAGDLSTLFDVGGIIGGIVAGLVSDYTNGRATTCCVMLILAAPMMFLYNYIGQDGIASSIVMLIICGGLVNGPYALITTAVSADLGTHKSLKGNAKALSTVTAIIDGTGSIGAALGPLLAGLISPTGWNNVFYMLISADVLACLLLCRLVYKEILAWKVSLSRGSGYAEQKQLPIKVSETNVNQAWVAGLVCSLPTVWWWWMWWWHQQVSG

SEQ ID NO: 791 - DNA, 29560 bp, Mus musculus
  misc_feature (1)...(29560): n = A,T,C or G
ttgcttttatataatatttgagtcctggtatcattcttctgaggaatgctgagtgtaggtttctatttatttgataagaatccagtggggtggggatgggggcgctggagagatggctcagcagttaagagattgctcttctgaaggtcctgagttcaagtcccagcaaccacatggtggctcacaaccatctgtaatgagatctggtgccctcttctgaaagtgtctgaggacagctacagtgtacttacatataataagtaaaagaaaaaagaaaaaaaaaaaaagaatccagtgtgggttggactcaggctgccatcttaggacattgctaacagtactgccatttggaggcctgttttgtgacctaacaatcacgaatttgattttgagataaatttaaagtttttattttgagatgggattttgctgtgttgccagcctagatttcacatctccatccttgagcctcaatccttctgttgctaggggtctgcttttctttttcgggagggagggtgtcattgtgtttgtttttgtttttgttttgtagagggtaaaccaaagggggaagggtggaaactgcagtttaggggacaattgtaataattcaggtgaagcagtgcttaccagagggagagggaaagaagaatgtgttttggatgataccaaattgttcttaaacattagggcttatctatcagtcacaagtatttttgccatatctacaactaaagaaacatgacagcatgtagtaatattatcggtgagaatcgttctttatacacaacacactatttctgttttggtttggtttggtttttgttcttaatctttttaggtaggaattagtgatcattaaattacattaccactgggtggcaccacagcatcggttagctaaagactgggctgggcttaattctctctgcaacaatggttttcaggtttgagcctctgcagttcaagtgcaaagtacagacaaggaatcaaatacaggaaattcacagatgccctcaaagctggtgttagagacttgtcattaaggcaatttgttggagagagaagttggaagaatgaagctctagaaaatcaaacttcttgggggagttggggtggggtttattgttggattgcacatgcaatcacagttccttggatacaacttaatttatccattgcttacatctgaactctgatttgtaaaactgaactgtggagagatggctcagcagttaagagcactgactgctctttcagagatggtggttcacaaccgtccataatgggtatctgatgccaccttctggtgtgtctgaagacagctactgtgtactcatttaaataaaaataaatcttaaaaaaaaactgagtgatttattaaaaatacagttacagaggcaggtggatttctgagttcgaggccagcctggtctacaaagtgagttccaggacagccaggactatacagagaaaccctgtcttgaaaaccccctaaaaaagaaagaaagaaagaaagaaagaaagaaagaaaggaaggaaggaaggaaggaagaaagaaagaaagaaagagaaagaaagaaatatagttacaaagctattcattgtaaaattatagtatttatcaaatggttgatttataagcaattttaccgatgtgaggatagggcaaaagccccagctctcacaatcccaacaggaaggctccacatctcattcaaatataacaaataaaggaaacaatagggtgaaaagcagagacttatcaatgtgtctacattgggaatgaaggaaaaaattaaaacaagctagtgtcatagtttatgttatagaattaatgtgctttcccagtaagaaattattccacatattagaagttaataaggaaaagatacaactggttttaactaatgcacaaaaaggaaccagtcttaaacagaaattgttatcagtttatacattctacatatgctggcatccttaaatctctttctggacccagcccttcgttacagtttgaacaatttaaacagattcaagagactgaaagtctggctacttgagcagaagagagatttacacagcaaagatactgtcagaactatttaaatacctcagttttcttttcaaatagatgttacccaggttcatcttgcatacctggcagaatttgcttttcctagtaagagcacagactaggtcttcatgatgtctgtgactccctgccccagtcccgccccaggtccattataggcatgttctttgatataggagtgagcctaattgtcagttgtaaatcagggttgtcggttttttttggtttttttttttgttttgtttttttttttgtttttttttttttgtcttggggagagaccgtaattggaggtcagtcttggcaaacaaacattagcaggaatgtttcctcagcaaccctaaacttcaattatgctttgaagttttctttcttacagtttctaacaagtttggaggcaaggctccttcagctaaattctactttgttaatatttcctaagcaagttgattaataaaccttttacagcacagctctattatttcaatttttcctgcagcaaataagtttgcctagagaatattaagtaacacaaagtagtatttagctaaagttgcattgttcagtaaaaacctcaggctgtgaggaatctgtgaagaattgcctaaccccagcctgacctttctgcaaagctaactcaccctgttcccagtaaaagcacaaaaacagcggcaactttatatatatatttgtccctcagcccttctaaatttactcaagcgtcatccctcagaaaggttgtgttcacttgctgtttttatcaagcattgccgaccaggactgcttgctcattaggcctatttccatttcaaaaggagcatgtttttgcttggccgttcagagatgacctggctaatagcctcttatcaagaaaagcataactctgccagagaggcagaatgacccaggttaactgcagccccaaagtgcagttctggcctggactgtttcaagataactatgacaattacccatttgtccaaatgaccaaaatttgcaggtttgtctctgtaaaatatcatgggagacatgagagccagtcctaacctgatggcactgtgtttctgcccagaaatgaacttctctatcccagtcattagagtgcccagatctgcgtaataatttacacaggtccccaggataactaaaggaacttaatgtggaaccagacatccaatccttaagggccactgacctttttctctggaatgcctgggagttcctgcaggggagataagaataggataatgggccctgaggtattaacagctgcctttgcttctgtaaaacctgtttattgctgtgggaaaggaatgaaatggtctttttattactgtatagtgggaaagtaagaaacaactgagggcagtaaaacaattctcctgcccaactatggattccatggattattgtgaaagaccccggaagggagaccctcacaagagaccaagcttgatgcaaaccacaaaaggctttattcaggaaaagccagagctctggggaccactcgtatcccatgcaggggtagaggggtagaggagtcaacccctcaccttaacccaccttctgcatgtcatgctgttcagcaataaggctgttgtccttctgctagcagtaaggataaactcgtttcatctcaaactgaattgaatctaagtgttcggtctttcctggtgtttagttgttcaaagtgtaacttgggaatgggaacctacaggcaaactaaccagcataggctatgaagatttctgttccagtcaagcttctttaagcaatagttaggagctcgataaggtttttttcttttatctctggggtctttgagcaacttcttgctgtgaagataaattaatctgccatttcaggagtggatgatcattaggtttcagacctgggacaaatggctgaggtgactatttaatataccaaaacagacatgttctagatttttccagcattcctcggcatacctgttacagggtacggctaccacacactgtccaggggctgagctgcccttaccccagctgcccttctcttttttgtctgctctttactctcctggctttcccctctcccttctccttacatgacccagctcagtctggtcatgttcactttggacactctgagctgtctctacgtctggctatgctctcccctttatctacaacaaacttcctcctgcacaatacccaggagcagtcacgtccttcctttttatgcatgtatattgtcatggaccaccccagttgggtatgggggtccctgggatgagggtcctcgaaggctagggtaaagctttggcgatgacaaacagacacaaacacagaggtagtttgaatctgagtgtattctgcagctctcaagcaaggatttttatacataaaaaaaacaaacaaacaaatattacaactctggaaaaaatgtattcagtgaatcacaaatagaacaggtaacatcattattatttggcacagtagaaatcatccaagtgttacaactctgaaaggatgtactcagtggggcagtcattcaaggctagtggcatatttctaagagcaggttaataaatctttatggtcaattattgttaaacatctaatgcatgattttttatacatctttggcgcataaatttaaactattttaattctttttatttaaggctttctttaccatataccaaagcccatctccaatgacacacgtgtagccatataaaattttattgttgggaaagtttttatttatcataatgctattatgtaattttgtaaatgatttatgaagtaaagtgttggtttccccagagataaggtcatgttagtgaccccatctcaagggatagtttcttatccattattcttgcttaagatcttggcctaggctattaggaacatgttgtaaataagaaaaggaataaagaaaacaaaatagatacattgtggtgagaattagggctcaatattttgcctgggcaagagttccacaaccggttcaggaggcctccttcttttgaagttttcgcctcagtctgtggaacttgtcacacagattctactggggttggtgtggcagtatatgtatgtatatatatatacatatacatacatatacatatatatatatatgcatttacttagttattacttatttctttatcaaccataaatggtgcttgatgtgacataaatgggagtggcataaatgagctctgactcaagctgctgatcatttgttcccttcccccaggcttaagcaggctaaacccaggtgtagtcttggccttgctgcactcctacaggaatttagaagaatagactaccctctgagctggctttgccacataatccagctgaaacaaaggatgggttttgtggtttttccctttataagctggagctgcagagttaaactttgagccttgatcagaaccttgtcttggcttcatccttctctcccaccctgtccttttcatttccagccccccaccctaccccctttcaggtaaacccagttttgctggacagctacaatctttccattttatttttctttttttcattcagtaaccactgacctgcctgaaagaagatattctagagagacagtgtgtctctcaatcatcacactactgaaacaatagacccaaaagacatgggaatttctaagcattctaatgctgggagaagggaagttcccagccagagagataatctatccccctgaaaagagatttcacacagttctaagaactcaccagagcactttacaggatggtactcaaacccagataatgatgtacataatgctgatcctctaaactttggtcttatttcaggactctcggggagggggtcagggtttgctagatctctttgtatttcttcttaatatagccacactgctttctaccttctctgctttatacttttaatttgcctttttaaattgacttattgaggatgggtacctggacctgacttggagaacaagatgtgactccacatgcccccaagttagataccaataggaggcatagtttggtagagaaataattgaatcaggggacaagaggcatgcacaattaagcattcatgatgaaggtgtgttctagctgatcactgtctcagtcaactcttgagggaacaagctggttctcctgagatgattaattctgctgtagggtaatgcctcacaatcatggataattgtccccacatggatatagcaggctcccgaaggctcatgttgcttggggatagtttgaatctcagcttataaagatgtttatcaatcagtcctgctgttcatggggtctagatgactccagacaaagggcaaaggaagcaaccagaaccagaaggacaagattgagttatttagtcagtgacctttggcctagtgactcactctgcctgctcttatggtgggttattatgattggccagcaaagcagcagtaccttttgaacttatgggtcggctagtaatgccacagctattaatgtcacagctattaacatcacgggtaattgtagtgacaatgtcaggacagtttgtggtttttctcagaattcagtgtggggcagggtaagggaatttttctgggaactgctgttgggagctattaagacaacacaattgtcctgatctctgaattgggcctctcctcccaagaagaaaagggggtcaaaagcgggccacctacgcaccgctccgagaacaaccacagattgttccagccctaagtcagtgctggatgtcctgacctcaagatgtaccctgatactgccaaaagaaaaatttctgctgccccatccctcctgctgaggtacatttccgctgccccatttctcctgctgagaagtacttccctgttactcagaatgtttccctgtcgttctctacacaaggttctcatctctctctaccccccaatttggttcttaggagaaggtcccctcaagaccctagaataactggacctgctggacgggtcaaactgctaatcttgttttggcagctgcaggcttagtctggtctttttgacaaaaagatagactgaaagctactcattatgaaccagtcagcagctggactacgctcctccatagtcttccctttgggccagactgagggctatatgatctcccccacaacaacttgtgtaattgtaagtggcttttgtgtgcttgtgtaactttttttcttcttatgtaatcgtcatctccggggcttattaactgtctgctaatgtaggcctagtcctggaagcttctagcctctctgtacaatcttatctaggcctagaatgttttcagcctctgtcttaaggtttccatggctataaagagacaccatgaccaaggtaactcttataagggacaccatttaaccggggctggcttacagtttagtcatggcaagaagcatgacaacaggcaggcagtcatggtgctggaggaggaactgagagttctgactaaaagtttgataaccagcagagaactgtttttcaggcagctagaaggagagtctcaaagcccagccccacagtgacatacttccttcaacaaggtcacacctcctaatagtgccacttcctgagccaagcatagtcaaaccaacacaatctctgatacttgctgctgagttttcatcgcaggaagacgttccaccttgctggcaggatcaaaattgagtttctgtttccaggccccaggtcccaactcctgtccttattcagatgtttcatgtttgtctgttaaccagtaaagaatgttaagaagggaagatgctgctatcctgttatctaaactgaggcacacaagtcataagtgtgctgcctgtcttgacttaattgactacatgctgcttgcccacttctttattcctctgtcaccctaaatttcaggtcagagtccaggaggtgacctggctgcaaaggctgactcaatgaccctgaaatcaggtgacctggataaggcctagtcatcagtgttaacctcctcatttaatcccttgtgtcaaaatatgattggtcaatgcaacagtcctcccattatcagaaaggagcataccattcattcgaggcaaaggataatacatttggggctgttacttggtataatggtggtgttctccttacaggctcttagagattttagttatgaacagctgggaaatcattaaaaggaaagcacagggccctggactaaaggtttagctctggtagaactatatatctatcatgaaaggacaggatgagagggtaagttataagtacagatctatctatcatctatctatctatctatctgtctgtctgtctgtctgtctgtctaaggcaaggtttcttggtctagccttgactgttctggaactggcactatagaccaggctgactttgaactcacagagatctacctgcctctgcctcctgaggggttaaaggcatatgccaccactgccagtctccgatttttaaaaattcctccaaccctcccaaccccccatttttgagataggatctcactaggtctgggacttgctatgtagatcaggttggcccttatcttacagagcttcacctacctatactggctaaattctgggatttgaagcacatgtcactacatctggaactttaaatttttcatttttaattatgtgtgtctgggtatgtcttcgtacatgagtacgaagtacccaagtaggccagagatatcagatctcctggagctgggatcacaggaattgtgaaccaccctatatgggtctgagaagagaactcagatcctaggcaagcactatacatgttcaaccactgagcatttctctggccgctaaatacagatttctaaagtttgtattacatgtatgtattctggtgtgtgtgtgtgtgtgtgttgggggtgatagtcagaggacagttcttctttccttctaccatgtaggtcctgagaaactcaggttgttaggcttggcagtgggcctctactcattgagccacctagatagagtccaggttttgtttcccttcccttccctcccctcccttctcctctccttccctcccttttccctttccctttccctttttccctttccctttccttttgagaccgtgtctcatctatcccaggctaacttctaacttgctgagtatgaccttgaaccatcctctcctaagtgctagaattagagatggatcccagggtctcatgctatataaacattcataataactgagttacatccccaagccccaaatcagattttgaccaggcatctgaagaacatttttcaatttgtaaatttagatacagcaacatggtttgccattttcttagtttgggatgtttttctttcttgtacatcatagcagattttcggtaatgaaggtgaaatgggttaattttgaagtcttgagttgaggggccagtggaaaatttagtcattagaaagttggatataatagatcctgaacctacaggctgaaaacagtcttacgtgtgactttataattatgacacaccgcaactgaatgtcataaaactttacttgccactccaggttcatactcttaacagtatgcttggcatacagtgctagcagcataagtccagcaagaggttttagaaatcagaattcgcagacatggctcacacgagttgtgcaattgcgcttcattcaggtctatagggtctgacctgaggagtcgccaggttagggcttcggcgttcccagttgccttgggaaccgagggacatccaaaacaaaacacagttcgaaagagggcggagccggtgcgtaagcccttcggtccgggcggccccgcgttccgcgtctcattggttccaaatttcgccgccttcacgtacccactacgctgtgtagttagagccacgggctcagtcttcctctcccgaaaaaggagacctaccgtacttgttttttttttctcctgcacgtgaagggcgagttccacttgctgatcgaataaagtcaggtaaggccacaaggactgcactaccctttaaagtagactcctgtcctttgttttggaggaaagtaacgtggtcacaacattgtttggagtttaacctttttgtttgcttggcacagagtctcaggttgtagtctctgggctgcaatgtagcctagactgtttcgagttagaggcagccctgccttacttagcttcccaagtaatgaaattagagaaatgccctgcactgtttgcttgtttacgtactttatctgtgtgtgcacgtgcgcctgtggaggccagaatgtgtctccagaagctaagacattggaatctgtggacctgtagaagaaaagcagctctcttaatacccgagccttctttctaggcggttggttagttggttggttcggttcgtttattcgttcatccatccatccggtctgtctgtctgtctttttgtaaagtagtagtacagggaggcagtcctacagtgggcagataggaagaggggccatggatgggtaataaaggtggaaaactttaaagatggttggcttttcctcacccacctgacccaagaccaaaaaaaaaaaagcctggcaatttaaaaagccttgtagctttttctccttcccatgctgatggcctggttcaaaaagttcaaagccagatcagggcagtttttcaaccattttctcattcttcaaagtgactcacactaaattaggggaggaaacctcttcagagacttcaaaatcaaaaacaacccgtccccccaattctcaagaagggactattttcagctaccctctgctttgccgaggaggggctttttctctgcgtttgctgcatgtgtgtgtttctttaccccaataaaagcatttcttcaacatctgattctgtctgcttctgtcttcaggttttgatatttctccactgctacctgttgagctcagaagtttttaaactcttggcagagaaaactgaatccaatcaagaacctttagacagtaatgccagttcaatcaggtattaccgagtacacagacagggctgacttgaattcttatcattgtttcctttttccatggagatctgcctgcctctgcctcccaagtgctcagattaaaggccaggagtttactattgtgcccagcctgatgtcattccagtaacataatttgagtacctacctagattggctttataacttcataaccaaactgccagtgctgggaagacatggtatcctaatacacagtaattcccatattactctgctgtaaaccttaaagctcatatggtagagtgcttgccttgaatgcatgaagccctggatctgacccaagcaacaataaaccttggagggaggaggaacactacaaatttgatgtctgtttggtctacatagtgaattccattgcagcctgggctatggtataagtctatattttatttgatggatatgctttgcctgcatgtgtataaacacactgtgtgtggtgtgtgtgtgtgtctgctgcctgaaaaaagccagaggagggcaccagatcccctggaactgaagttatgattgtgagctgcgtgtggatgctaggaaccgaacctgggtccactgcaagagcatcaggtgctctttaactgctgagccatttctttacatgcaaggctatcctaagaccaaaacaaacaaaaagatataccttatttcatttcatgaacattgttataaaaatagtatgcctgtatatttgtgattatgaattactgaaaggatttcacaggaaaaaaaaaagtgggcctggagagatggctcagcggttaggagcactcactgctcttccagaggtcctgagttcaattcccagcaaccacatggtgactcacaaccatctgtaataggatctgataccctctaatggtatatctgaagacagtaacagtactcacatacataaaataaatacatcttaaaaaaaaaaaaaagccaggcagtggtggtgcctgcctttaatcccagcacttgggaggcagaggcaggtggatttctgagtttgaggccagcctggtctccagagtgagttccaggacagccagggctatacagagaaaccctgtctcaaaaaaaaaaaaaaaaaagaaaaagaaaaaaaaaaaaaaaaaaaaagagcaattagatttctttgcccaaactggaaagccaaagctgtcctctgacatgaatttgcacttacttctgagttgttagtgcatattattatgtggctagcttatttttcttgttatgtggaaggatatggacatgttggctagactaagaaatttcagtattgtttctttgttgtagagatccagaaattccagtgtcaattaagtggaaagatggaccctcattctatctgcttgggaaacagtccttattaatagcaacactgacagaacctgaggtttggagatgtactaatggctttcagcctgtgttggaaagctcccaggagcccatggagtttcctgcaggctgtgaacaatgggtctcccctgtttctctggaggacagtggggagctgtttggatcctaagatgaaagcctacctggaagagaacactgaagtcaccagcagtggtagccttaccccggaaatccagttacggcttttaacccccaggtgcaagttttggtgggaaagggctgacctgtggccctacagtgatccctactgggctatttactggccaggaggccaggctctgtctaggtatgtttcattgaaatatcgaaaatccttcctttatgcacccatccccacctccatttcattctctctggccccatatcatagcagcagaaccagaaagccgctgaggcccatgcaagtcccaacttttatatggtttggattgccatccttctggtgaagtagaagaggatttgtcttgtgggacaacaaagtcatctccaaaaagatggcatatagttacccatgatagcaggaccctgtaatcctgtcacttagaggctgaggcatgagcctaggagttcgaagctatcctgagatacggaacaatgctttcttaaaacatttaaatagtctcttgtgctcacatacttgactttggcactgccacagagaggaagacagatgtcgaggcctcttgagtctgggtttttagctgagactaagtgagaagacagggattgtcaacaaaacagagagggctgcactacatccagaactggtcactgttaatttagcttggcttcatgacaatcatagatgtggatatcttcgtaacaaaatagttctcttcacacctgccctgggcaacctttgctgtcaactccaatgaatctggagttaccctcaagacacacctcttggcatctctatgagatagagtgcttttcttatgttttctattgctgtaataaaaacataaccaaaagcaacttgggaaagaaaatgtttatttcattttacacttctaggtcaaaggaatctatcatcaggaaagtcagggcaggaactctaggcaggaacctagaggcaggaaataaagcatagtccatggaggagccctgcttactggcttacttcttgaagcttgctcagtctgctttcttaacaccatacaagattacctgtctggcacattgcccccaataggctgggccctcacaaatcaatcattaaacaacaaaaagagtctcttaggcttgctcataggccactctggtagagtcattttctcaactgagtgtcctctttcgcacttgcctttagctagtgtcaagttgacaaactagccaggaaaggatattttcaaagatctttaactgaggagggaaagcccaccttgaagtgggtgacacttctaattggattgcactctgaatacaagaaggagaaagctagctgaatcgtagaatcccttttcttcatagtttgtcccgagagcatcttttttttttttttttaagacttatttatttttatttatatgagtacacttagctgtcttcagacacataccagaagagggcatcagatccccttacagatggttgtgagccaccatgtggttgctgggaattgaattcaggacctctggaaaagtagtcagtgctcttaaccgctgagccatctctccagcccgagcatcagtcttatactcttgctgccacaggtccctactgccatccacaatgatagattgcatcttcaaactgtgatccctcaaaataaactctacttcccttaaaagtttcttgtcaagtatttgtttacagcaatgagtcatattccccccaccctcagggtcttactatatagccctggctgtcctagaactcacagagatccacctgcctctgcttcctgtatgccactattgcccagcttccaaccttttttttttttttttttgacttacctattttgtgtctgagtgttttgcctgaatgttatatctgcacttcatgtgtgtgcctggtgcccatgaaagtcagataaaggcatctgatcctctggaacttgaacttgaatcttctgcaagagtaccaagtgctcttaaccactgagccaattctccatcactgagctaactctccagccttcctactaacttttgtaacacataccttgacccaaactcttgtttttatagcagtttggtcattgctttgttgcatagttttattgccatacacgaacttaaggcataaccacagattaagattccacccctcaagaaactctagtatgagctattaaagaacctacatggtcataaaagatccatgtcttactttgtgctcagattcatgtgcatatcaacaattagtacagagttccttgatggatcctaaagacccagcccttcaaagaccctgctttattactataaatgctgcctgcttgtagcattggctcttcagcacacagaagctgatcacttgggattttctctttggcggctcattttaggtgggtcctgcatttgattcaatttagcatcatccatcttgttttttcatatagttgcaactatactttttgttaggaaacagtagcagaaacaaaggcaaacacttttagtatgtccatctctttgctttagcgtttatcttgatttcatctgattgtcttaaggatgtagagctgtcagacaaaaggtcttctattttccaggaatagtattgttactgctacaggccaggtaggttctctaccatcagaaaaaggttatatttagttgctttgtgtgtggaagtacaggtatactgtggtgtgcatgtgaaggtcgagaggacaacttgcatgaattgtttttttttctacactatgttgaactcagttcaccagacttccaagcaagcacatttatctactaaaccatcttgcctgtttttgttttaatgcttcttactctcattttccatacctcagctgtttcctccttcctaatttaggtatcttttggataaccctgctgttgttagaggaaagtctgtcttagatcttgggagtggatgtggagctacagccattgctgccaagatgagtggagcatcaaagatcttggccaacgacatagaccccagtaaggactgcatattttaaaacatttaaagctcatcctcttacacccgtacctcccttttcatcatgatagtttattgccttgttttgtattctgatactgtgaggtatattcagtggggctcatttccccaagaggatttgatttgtttgccagacattccacagggatacgcagggacacacatgttagctcagggttgagaatgccctgaaatatgtaagtaatgtttatttgacacaaaatgcaagtaaagataggctcgtgtctttaatagatatttttatagcattaaaaccaatctgtgttgggtgtggcagcctataccttaaattccagcactcaggaggtagatgcagttccaggctagctagggctacaaaatgagaccctgtttctttctttcttcttcttcttcttcttcttcttcttcttcttcttattattattattattattattattttttttttttttttttttttggtttttcgagacagggtttctctgtatagccctggctgacctcaaactcagaaattcgtctgcctctgcctcccaagtgctgggattaaagacatgcgccaccacgcccagctgagaccctgtttcaaacaaacaaaccaagaaacaaaccaaacaaaaaaccaagaaagaaaaaggcccaagttgtgatagttaaacttttatttcatatgattttttttctgaacctaccttcatttagaatagagctcttcaggggtctttaagaggtttcagatataacttaaccaagcccaacatttgtttttctgtacataaacatacgaaaaaataacccaccactgctcttctgtatttaatatatagcgttttaaaaacattcctttattggctatagcccacatgagaaagtgatagaccaccatgaatataaaaccaaataagagctctttatttaagctagagaactgagagcaggctcttgtcacaaccctaaccctgatttatacaaacaagaccacaattaaatcacatgccgcaagttaggagagtttttactttttttttttttaagatttatttatttattatatgtaagtacactgtagttgtcttcagacacaccagaagagggcatcagatctcatcacggatgttgtgagccaccatgtggttgctgggatttgaactcaggacctttggaagagcagtcagttctcttacccactgagccatctctccagccagagtttttacttttaacaagggatcatttcccaacaaggaaggaggaatgttgggagtgaccttgctcgaaccttaactgctttaacgccttgtcagccacaagcgcttactggtacaaagtcctggcctctgtgggaaagtactagcctagttgagaacaaatagctatagatcttgtggacaggtacctagcaacccattctgttctgttcttcctgctgaactttttacccagccaatatcctggtcttgagaacaggtgtggttcccagagataaagcgatcctgctctacccccaacccccagcaccccatatcctgcttctatgagtatataacctgtatgggaataataaaaatttgtcagcttgatcagatctcctgactcgatgtcctttcttctagtctcttgccccaccccattctcttccaagtgccccccaagtccctgtcaactgtcccgagggtcaggacagaggaacactgatctgttaaacattttacaagcatcatctctgaggagaaactgttttgtcaagcaggatataattctgggtgtgagggtgggtatggggtcaggataacctgatctctactagaccatttcccttttctttcctttttccttttttctctccctttctctttccctccctttctttctttcttttttttttttctttttgttttttcgagacagggtttctctgtgtagcccccgctgtcctggaactcactctgtagaccaggctggcctctgcctcccaagtgctgggattaaaggcatgagccaccactgcccagctcttggttttttttttttttttcttatgagacagtttcatatagcccatgatggtctcttagttctttaactaaggataaccttgaatttatgatcttcctaattccacctttggggttataggcatgtgccaccatgtccagcctctttgttttgttgtttgtttgaggaaggttttaggctgaagacacagctggcttggtacctccctttgtatcccaggttggctcatacttgcaggaatcttcctgccgtatattaccaagccttggagtgacaggtgtttaccatcatgcctagccagtatgtaatttatactggcataaattttaaacttctttgcctaaaaaataacaggagctggagagattgcttagtggttaagagcactggctgctcgtccataggacccaggttcagttctcaggactcacatggcagctcacaattctctgtagctacagttccaggggatccaatacactcacatagacatgaatccagacaaaacacatatgaaataaaattgaaaacaacaaaaacaagaaaaaaaatccgttttaacaaaaggtaagtattagattatttttacatttattagttcatttgtgagtgtacaccacatggggagatcagggtcattgtgtgggatttggttccttctttccaccatgtgtgtcacatatattgaactttgtttgttgaaacagggtctttctatgtagtcctggctgtcctagaactccctataaagaccaggctggccttaaaatcacagagatctgcttgtctcatctgagaccggggatttaagttgtgtgccatcattcctggccttcagatgttgaactctttaggtttagcagcaagcatcttaacctgcagagccttctcattggcccctaatgttagatttttaaaagtgtttaaataataaggaattaaaacagcctactgatacatgcttacagaccaattcatcatgttttctaaagttgcaggaatggcgattacactaaattgcaaattaaatggactgaatccttttcctgttttaactaaaaacattttgaatacccaacaaggtaagtttgatctcattgttcttggagatatgttttatgatgaagaccttgcagacagtcttcatctgtggctgcagaactacttttggacccatggaacccgagtactgattggtgaccctgggaggccccagttcagtggacatagcattcggcatcaactgtaccaactagtagaatacacacttccagagccaactcagcaagagaacaatggactgaccacaagtgctgtatgggattttcatccctgatttgttaaagtgctttcaagtatgaatatagttctgtttgtgttaagttctaaaaatatcctctgtaggaggtattcaacagtttaaagaatgcaattcagtggcttgtggtggattgggccttgaatactaccacttgggaggctgaagtaggcgcatctctgtgactttgaggacagcttggtctatagtgagttcaaggacagccagagctatatagtaagaccctgttccaaaaatagatagatagataataaagtaaatttcttcattcctttgctgtgacaccttgaataactgtatggtttattaaagttagttatggttatgttcccatttcacataccaaggtgtcaggattttataacaaagcactctatcatatacaattgcatatgtagaaggtatatttatatatgtatgtatgtatggatgtaatatatataatttgcttcagtattaataaaatatctctggaaagataaataaggaactcaagtgttatctttctgatactatatcaaaataactgaggaaatcagcttaaaagagaagtgatctagctccgtttcagaggctccaatccatggtctgctggttccattgctttgtgttgaggtggggtgagatattaaggcaaccacagtatgcagcagaaatggcttctcacattatggtgaccaggaagcagagagcaagggaccagggataagggtgggttcactggtcccaaggaacaagaccagggaagttgccatggggaagagaatgagagaaagagtgtacaagcagggagagaaaatgcaggagagagggagggagagagagggagaccaaaatatctgggttatatagggaagatcttctatgggtggggaagcccagcacgtcagctggacagttcatgacagagggctgggtatgccaattgtgtgccctgtaacaggtgggagaacctggaggtcaggttcactttgttatgtaaaatatgcatttcagccacttggttccaggtctgaatcccaacacttaagatccacttatgaacacgaattcactggggatggactaggctttcaacacaaatcttggcagtgaggaggtattacagattaaagctataactggttatgtagaggaattttagttcaacaatatggctgctctggcaagggatcacatccaaaggctttctaagtttatgtgattcagctggaatacaggtactccctagatcacagtagttgtggtgtggctggaatgcagtcatttctttagtgcatacctttagtcccaaacaatgaaaagtaaggttaggggctggcgagatggctcaactgttcttccaaggtcctgagttcaaatcccagcaaccacacggtggctcacaaccacccgtaatgagatctgacaccctcttctggtgtctgaagacagctacaacgtacttatgtataataataaataaatctttttttaaaaaaaagaaagaaaagtaaggttagtttatagatggaatcagtcatgtttgaaagtgatagctagttgaggggcagagaaagtgactaatcaaagatttgaccgaatgagtcagagagtaggatatgcccaactctcaagacaacagagaggaagcagttttatagagagatgttttaggaagatagaataagccagaggataaggagccagaagattagaataaaatgctagttagtttaaggctaagcagagcaattcagtgagaagctgaaataagccaaattgagtaagagactggagaagagtttgagccagaacagctgagttgaaccatccagctagagttcagaaaaaagctagagagagtattgtggtaaatctccaactatgccccggtaatgaaaataactcaatttatattgaatacatgctgtgtgcctagattgggcagatctaccgctacactaccatcttccacatctatgagaccccttaggacttgcagtttctccaggtcatgtgcttctgctcagtttctcttcttcctactcctctgttcctctccctattccatttttcctttttccctctccccaccttcctctccaccttcccttttatctgttcaatcatcagctctcctttattttataaattaaggtgtgaagtttacaggaaatcacctgagtgttgacccattcctcgtttgcaaccactcacatgaaaatggatttaacatcaaatataattaggcccagggctacctacaataagagggtgagttcattcagcagtaagcctccaaaataatttttatcaggcaaattaaagatacttctatgggcttaaaaaaaaataaaaaaataaaaaaaccaaagtttctctattccttctgaggcaaccaaatggtctattcactgggttaagaaatggtttttatctcaggaggcagaggcaggtagatttctgagttcaaggccatcctggtctacaaagtgagttccaggacagccagggctatatagagaaaccctgtctcgaaaaaacaaacaaacaaccaacccccaaaaaaaggttcttaattattttggaaattttggatttgtacttacatatgttatacttcctattatctgatttaaaagttgagcactgccactttgcatgttataaataccaaatttagtctttccaaggtaccctcatagtcttatacattgctttggaattgtcttggatgcttgaattacatattttctaacaataaacaccaggatactatgatgataagattagatttaaaaggcagagaggtagcaaaattaaaaacaaacaaaaagaactacggtaactatataggaatttgggggctagggatgcagaatattgttttagaaggtttttactgttttgtgtccatctatgtgtccgtggccttgaactcatattccagcctctaccaaaagtgctggatcctgatttgtgcaatactagggactgaaccctgatctttgtataaactaggcaaactatcaactgataaagtgcactgggatcttggaagttctgtacttgtgattctggacttttggaagtcagagaattttaattacccagtgagtcgactgctgctactcaaaattttcattagtatctacgtgggggggggggcttagaaatgtaaacttgggagctggagagatggctcagtggttaagagcactgactgatcttcccatgtggtggctcacaccatttttaatgggatctgatgccctcttctggtgctgtctgaagacagcgtcagtgtacatatataaataaaagaaatgtaaacatgcagcttgggaagcaagtaggaaaatttcagatcctcacttctctctcagctcctctaaaaccaatcccccagccccatttcctgctttgcagcagaccacctgctgcggcttcccattctccctgcccccatcttcaatggatcccctaatttccctcctgcttctcattgctttttcccagcccccaactcaagcaggcactccctggaaacttgcaggccacttaggtcagggatgctggtaggataatggcagagctctctaggctgctccctcggacaccaatcccctaatctgagaccaaactgtgggaaaccagaccttcaacaactcccaccctgaagatccaactgaccctttgatgggagcagagtcacctcctccttcttgtctcgacttggtgcctgggactgtttagatagagccagcattccaagataagctgctagatgtttgaagcctgcactcagcatcctccccagatgtccgtccctctctctgtgctttgatcattccccctcggcccctccctattttctctcactgtgtgcttataatcaggctcctagcctccattaaacagaccttgacaaccctttgtttggtctctctcctctcacctgtttctttttcaggcttggtccccctcaatcccacgaataactaggtcgggatactaaccttatatccagtttggtaacagaccacttgcagcagccccacctccttctccagtgggtcacacaaatctcctccaaactccattcactgctttattccagccccaacatcaatgggcactccctgcgaatagcccaggccttggttttggacccctggacaagaaactgagctgcatattttacatatcgaagcagatctgacttccaggttttcccagcattcctcagtccctacctgacataccctgcctccaaccttgaattttccagaccaggggctgggctgcccttcccccagaggcctttccctatataatccagacattccatctctcctcttctctctgcaagtgcctgtaacccctttctctcttccttacttatccccctcccccatttttccatggtgacttccctggccttggggccagtgaactcccccacctgagagcagctttccaatagaggtacctaaatctaatctggcctaaattggctcatatcaccgatggtgttgaaataacctatcagatggtgctgaaacctgagaatagaaagcttcccccaaaagtaagggtctaagaaatgaaggtctaggggtgaaggggtctattcattccattttgtctacagtcagaaactcggccataagccacctgctccagtagcagaccccaaagtccaaggaacaagacaataaaatctcccacccaaggaatggcctgaagatagccacatgaatgggagatatctggtctcaagataagccatctgtgcttggcagccgatcctgtggttaatcattcttgaagcaaaaatgcagtcctggcactctccaatgaggttttagattacctaactctaacaatataataatgaaatatttacctatattaagtctaagtcactttgcttctatagctgacctgcctaacttgctccagaagctgcagtctcaggctttagcacctcatagtaaagcagggggtattaagcagcctttgatctatctctgcaggaactgcttggctctcctcacagcctgcctagttgaagtcacaagaagggtggaggaaggagcacaattaggaatgaacttggtggtgtttactccacaatgtgaaatcaatggaacttcagtaaacaatctctgtaatggtgtcactgtgaagctttggctggccaagattatgctatgtagatcaggctgttctcaaactcagagatctgcctgcctctgtatcctgagtgctggaattaaagaggtgctacgaccacgcccaggtctataatggtatttcatatttacttttttttttttttttggtttttcgagacagggtttctctgtatagccctggctgtcctggaactcactctgtagaccaggctggcctcgaactcagaaatccacactcccgagtgctgggattaaaggcgtgcaccaccatgcccagctcatatttaacttttacacactctgggcctggaactgcaccacctagcatgcatggaaccataggttcaatattcagtaaacacacacacagacacacatacagtgagagagaacctattttgccaagaaagaagcacattagcacatcttttgaaagagcagccatagaacccaatgaaactgccttgggatacaacagctcagtggtagcatgtctgtctagtatgtatggtacctgagttcaagccatagaacggaggagagtaagaaccaatgagatgagtgttttagcggaagcctcagtgatgttaacacattgaatggctgcctctgtgtgtgaatcccacccaagccttgtgcaagctaggcaagtgttctgtcactgagccacttgtgcagctgaaggtctcattttaactgatgaattattaccatttacttaagtgaaataagtatatcagtttctataaagaggtaacaggccttatgttccactttgcttttggctgacgttttctaaacacatctttatttagaattctacccatatctcctagaatagctcaaatacctacactagaaataggaatataaaggtaaaataagttgaagtggaagtttctgatttctttggaaactatgtcatgtcatatgatgttttgctaaagcagacacatggaagaatgttaaagcagacatgtgaaagaatgttttgctgaagcagacacagatgaaaggatgttttgctgaagcagacatatgatgttcagaaaatataaatatatccccatagacagtcggaggtggctctggcattgcaccttgctctgcctaactagtctttgctgatgaggctctggctttggtttgccttgctgatttgtgattggtgactgcccagtggactggattgaagctgctgatgcctattggtgttttgctagaggactggactgtggacaacaaggactgaaatagccgcccccccaaaagaactatttctaaacagttttaaaataacctttcttttccacttcctctcatgggtggtgagctagaagggacaacccttattaaaataggttttgaaaaatctaagcctacaataaatcatttgaaacttttttaattaaagaaacaaatccagccctgtccctatcaagtagaatttacataataattaccattaaaaagtggctcaagccgggcagtggaggcccatacctttaatcacagcacttgggaagcagaggcaggcagatttctgagttagaggccagcctggtctacattatgagttctaagacagtcagggctatacagagaaaccctgtctcggaaaaaaaaccaaaaacaacaaaaaaacaaaacccagaaaccaaaaacaaacaaaaaagaaattagctcaaataaatatgggacaatagaagtgtttaaatgttgagtcttgttaactttatagcacaaatatttacagtaagattgaatagattctctgagagtcacagcttaactaagacaatagtaaattggtgttaaattaagtaataaataaatatttatagcgcaaatcctgtgcaaggttttgagatcagcctcggtaaagatcaataaacagaccaagtcacttgctttagttttcttgatcctattaattgctccaagacttcttgtgaacgatctataaaagagaacaatgacactatattaatttacaataatcaaatgtatttaatgttttttcatatataaactagatgtaagctgagaatatgcctgtaatactagtacttaggaggtatagatataagggtcaggaatttaagacagatccaactcatagcaagtaggaggctagcctgggctatatgaaatattgtcttagcacaaagttaaaaaaacaaaacaaaaccctaggtgtggtgataactattacagggttattggaaggattaaaaacaacatgaaataaaagcatagtggtagagatatgtaagccaaagccctcatgtttggctttgatgaaatgtatagtaaagctttgctttgcttgggttagcagaggctgtgaaattgttttgagactaaaccttgaaggaatgtctttctggaaagtctgcacttggtgctccgtgagagcttgtagctgcacaaaccttggtcctaagatatcctggtgaacctggagttcttacttttaattctggctagtcatggtcaaaaaggactgagatttatgtgtgctatctgatctctcgtgcatcaggggaaagaaactctggtagatggaacttttctcagccccaattaaccttgtgtaatgattgaataaaataactagagtgaactagctaggtgtcagtctttccaagaaggctgaacacctctgctcctttggaaaatgaaggcttagtaccttggtgagcttctgtctccactgtggcacctatgaccaacatcattcaatacatagtggggctggcaagatggcttaagaggtaaatgtacttgctgccaagcctgacaacctgagttgaagccctgggagccacatggtggaatgcctagtctgacctcctctacgtgcatactagatgatatatatgtacctctctatacacaaataaataaatgaaacttatcaagcacatttaaaaaaattattttattttattttttttttttggtttttagtggcagggtttctatgtatagccctggctgtcctggaactcactctgtagaccaggctgacctcgaacttagaaatctgcctgcctctgcctcccaagtgctgggattaaaggcgtgcaccaccacacctggcttattttaaattttaagtgctttgcctgaatatattatcagtgtaccatttgtgtgcctggtgtccatagaatccagaagagagcatcagattccctggaactggatttatagacatcatgggttaccattaattattaatgcgttattcagttgcatactatgctttgaatttttaaactacatttacttaacagggctggagatctagctcaaaggttaagaggacctaggttcaattaccaacacccacattccactccctggcccccataagctcatggttatatcataatgcaaaatgcatttagtccaacttgagaagtctccacagtctggtttctcagagactctatgcagggaccaccctgccacacacatacctgaacttagctgctctccttaaatacttgtgtacctttgataactctaaagccagaaccaagaggacagcactgccaagtttgactaccttgaatccaatttgtagcagcttgatttgttgttgctttttagcagcaaaaaaattctcaagctgggcatggtggcgcacgcctttgatcccagcactcgggaggcagaggctggcagatttctgagttcgaggccagcctggtctacagagtgagttccaggacagccagggctacacagagtaaccctgtctcgaaaaacaaacaaacaaacaaacaaacaaaaaaaaaccccaaaaccaaaaacaacaacaacaaaaattctctttgccttttcttttcacaagttggaagcttagctgagtaggctcctgccctgaggccatcctttatatcccaaggcagatttggccttgccttgatttccatctcttttacacacaaatgtggctccaacattaaatttcctggtgttcttttcctcttcaaactgtacatttagtatttctttttgtcactttctctttttcactgtagactgaaataggagggattactaataaccatgtgacagaatcaatattaggctgtattgaaacctcctctgccaactaagtttagttcataatttgccaactcagcctcagacaaattattaggacaagggtagaagacaatctttgtcaaaataccacaagaattgcttctagccctgttgctaatattctcttcttaaatctcttgcgcctgcctccatagtccatatggctctcagcactgctgtcttccaagaccctactaagatggctcataaactctgtttccagtgttcaactgctttcctagtcttaaatactggattttccacactcctcctaaacaagcatagtcaggtctgttacagcaatacccgactcctggcactaacttctgtctcagttacttttctactggtgtgacaaagagcatcactaagaccaagaaccattctgaaacagtcccagcaaaaaattcaggtgattttttttttaaaagatttatttatttattatatgtgattacactgtagctgtcttcagacacatcagaagagggcatcagatctcattacagatggttgtgagctaccatgtggttgctgggatttgaactcaggacctctggaagagcagtcagtgatcttaaccactgagccatctctccagtccttaggtgactttttttggttttctttttctttctctttcttttttctttccttctttctctttcttttctttcctttttccttttctttcctctttccttttctttcctttcctttttcctttcctttcctttcctttttcctttcccttccctcttcctttccctctccctcttcctttnnnnnnnnnnnnnnnnnnnnttccctctccctccccctctccctccccctctccctctccctctctcctatttgggggcaggggtatcattttcatccaagatatcacaaatgcttgttatataagtttgttacatatgaaatcaaagtagttggtaatcagataccttccctttctccccaatgctgggtattcaatccagggtcatagcatgctaggaaaaactactgctaatctactctttctcttttcactatcacttagccttaaattcaggcaattatctagcggaaatattaaggtctttaaaagtagaagacaggcacaggcatgttgtcaaaggattatcataaattagaggcaagcgtgggctacatagtgtataccaagacactgg

SEQ ID NO: 792 - DNA, 985 bp, Mus musculus
tagagccacgggctcagtcttcctctcccgaaaaaggagacctaccgtacttgttttttttttctcctgcacgtgaagggcgagttccacttgctgatcgaataaagtcaggtatcttttggataaccctgctgttgttagaggaaagtctgtcttagatcttgggagtggatgtggagctacagccattgctgccaagatgagtggagcatcaaagatcttggccaacgacatagaccccagtaagtttgatctcattgttcttggagatatgttttatgatgaagaccttgcagacagtcttcatctgtggctgcagaactacttttggacccatggaacccgagtactgattggtgaccctgggaggccccagttcagtggacatagcattcggcatcaactgtaccaactagtagaatacacacttccagagccaactcagcaagagaacaatggactgaccacaagtgctgtatgggattttcatccctgatttgttaaagtgctttcaagtatgaatatagttctgtttgtgttaagttctaaaaatatcctctgtaggaggtattcaacagtttaaagaatgcaattcagtggcttgtggtggattgggccttgaatactaccacttgggaggctgaagtaggcgcatctctgtgactttgaggacagcttggtctatagtgagttcaaggacagccagagctatatagtaagaccctgttccaaaaatagatagatagataataaagtaaatttcttcattcctttgctgtgacaccttgaataactgtatggtttattaaagttagttatggttatgttcccatttcacataccaaggtgtcaggattttataacaaagcactctatcatatacaattgcatatgtagaaggtatatttatatatgtatgtatgtatggatgtaatatatataatttgcttcagtattaataaaatatctctggaaagataaataa

SEQ ID NO: 793 - protein, 132 aa, Mus musculus
SNKVRYLLDNPAVVRGKSVLDLGSGCGATAIAAKMSGASKILANDIDPSKFDLIVLGDMFYDEDLADSLHLWLQNYFWTHGTRVLIGDPGRPQFSGHSIRHQLYQLVEYTLPEPTQQENNGLTTSAVWDFHP

SEQ ID NO: 794 - DNA, 21823 bp, Homo sapiens
  misc_feature (1)...(21823): n = A,T,C or G
gagtgtctgtgccagaggctaaaagaggtatgacatggtctgctttcaagtctaggcagtgacggttctgcttgatatgcttgttgtacatgcccataggaagctaagaaaataggaagattagcgtgtaggctggcatgttggggaaggcttttcagaggaccttaacgttgaactgagttctgaaggacgagtaggtggtttggacagtgaggagcggttagcagtggcagctttctgtcttcaacaaggcctagggatgagagaacaaggcgctgtgggaggaaaacaaattgcagcagagaggggagaagaggagtgttttgaaaagaggcaggataggttaagtcgggactgatcagcatgggccaggaaagctgtggtcaggaatccggctgtaccattgaaggtctggggagctagagcaggttttaagcaagggagaacacagatagcctgctgatgaacagcacaggccaatcgagtggagcaagagaaaccatcttgcccttagattggctagcattacggttaaacgagtgtatttaattagtctccaagtcctgctaatagctcatccttaatcattttcaaatgttccaattctttccatccctatcgcagttaccttagttctgtctccattattgtttgcttggattaccataatatcctccaatggcggtttccttgtcttcagtcttgccccgcctttaactctttgctacctgcagcataaaacatttttctaaaattcaagtttgatcctctcacctttaactgaaaacctgatctgctgctcatcaacactatctctgtgtttctaataatgatcatcactgtaatagcatacttagcaagcatttactacatgccaggaactgggctaaacaagatgtgcttttatcttattaaatcttcctaaaacattattactatcatcactattttacagatgaagaaactgattattaagaaggtttagcaatgtgtccaagatcatacagttaataagtgtaattgaataacttgttgaaaaaccaaaaaacccttaaagacaaagttgtgtagggaatagaattttttacttgcacctgcaagagggaccgattattagagaactggctttgtaaacaaaaatgtagggcaggtatttaaagtaaaaaaatcacaaggatagacaacagctcaaattgttatcagttcacaagtctgcttggatgtatgtgggtcaattttgttaaaatctagacggtcctttctattaagacattacaatgcatcaacaccaaacaacagaaaagaaaatccatatatccctgtttttcatgctttgtctgggactaaaggaagggcaggccttttctagactatggaatctaagtttcagaaaaaaatcatttaagctgcaatataaagaataatcttggccggtcgcagtggctcacacctgtaatcccaacactttgggaggccgaggtgggcggatcacgaggtcaaaagttgggcaccagcctgaccaacatggtgaaaccccgtctctactaaaaacacaaaaattagctgggtgtggtggtgtgcgcctataatcccagctactggggaagctgaggcaggagaatggcttgaacccaggaggcagaggttacaatgagccgagatcatgccactgcactccagcctgggcgacagagcaagacttcatctcaaaaaaaaaaaaaaaaaaaaaagaatagttttaaggaaggcagaattagagatagacaagttataggaacccaggcaagccattataatgccaaactaaggcaatggcaggagggatagaaagaactggaccagttttaaatccattatgggacaggaaaggcatgttgcagtcccttcagccaagttgcaagttttgaatgagttatccaaacattattaaatgcatcttcagtgatgactaccaagcttttttccaggaaccaaccctcttttgtaaaaatgttaggttagcctgttcgttctggtttcttgggcagtgactgggatgttcaaactattaattgggatagaacaccgaagctggttaaaaacaatatttcttatagaaattgatcttgaacatggatcaaggttcactgctagcaggagaatcggagagtgtgtggtaatgaaaagttatagttgagaaaacaagcgtttacatcagcaactaattaagaaaaaagcagctcataagtggatgaatgcagttcataaacacattatatcagttattacacaggaaatctaaggcagaatactgtgaaatgcaaggtgtatagcttatcaacaagaatgtagcaaatacaccattcaactaagaaagaaatgataaggctgcatctggggctgttgactggaagcacaaagtttcctttccttgtagtagttcctaaagattccagtttacatggaaagacagaaagctgtcacacccatggcaggagcgcagaacccaagcgacaaattctaattttgaacaggcaggtgccagtgcatttctcaaactgcaaactaaaatgcagaaacacgattttcctgtttcttagttttggaccgttttcccccctctagcacgccagagcaggttttaattgttgtcaggtcagatggtgagttaactttgagtgttgagttgaggggccagtgggatgtgggtccagttgaaaggtggatatatgtagatccagactcgagtgatataggctgcaaataaattgctagtgaatttatgaattattagaaaagaaaggacattcattatgatttaatcgcagttgaatgtaggcagcacagagggcttatactgtgtcttttttttttttttttttaaatatacggtgtctattttgctcaccactctatgcccggtgcctggaagtgcgactggcacatagtaggtgttgcatagtttcagaatgaactttttaggaatcaaaattctacaaacattgcacacagatttaacgttcccttattttccaggtgaggtcagggcgccctttggtttcgcgcttctgtccctttaagaaagtggaggagaaagaaagcgctgctgggaaaaagggcggggccgcgaggggccgccgtccgtcccgccccctgccgggccgcggcgctctgctagagcgtggctcagttttggtagcgggaccccggaaatgtaaagcatgagcgggaacagtcgccagggcgagtgacaggcgagccctatgctttacttccgagggcggtgtcagcaaagctaggtaaggagacagggaggacggtgcctgcccctttaagatcgactccaccccgcctctggaggaaaatgacgccgccgtctacccgttgtggaacgtaactcttttcatcccatcagctctccttctcattaagagaaataccaagtggtcaccacagtcacatacttcataacccatgcctcatcggtgctgggacgggagagggaagcgccgatctaaatgacatggggtccaaatcccaaataatctctatttgctctgcgttacctttaaacttaggctgcgttgtgtgattcaagtgacagcctagtactgcttaacaattagtctagtgggataccaggccctgagagacccctacgatcccaggacactgatgtggggtaactaacacccactggaagtctacgctgagttcacaggctatgtatgacctgacatgcattttgacctgccctgtgttttgatatttgaatgagttgctgatgtttacaagccgaagctggccgggcgtggtggctcgcgcctgtaatcccagcactttgggaggtcgaggcaggaggatcgcttcaggtcaggagttccagaccagtctggccaacatggcgaaacctcgtctctactaaaaaaaaaaaaaaaaaaaatacaaaaattagccgggcgtggtggcacgcccctgtaatcccaggactcgggaggctgaggtaggagaatcgcttgaacctgggagtcggaggttgcagtgagccgagatcacgccactgcactccagcctgggcaacagagactctgtctcaaaaaaaaaaaaaaaaaaaaaaaaaaaggtggaagctaatgtgtcaatatctagatttttttgatgattttgagaaatcggaggatctggcagcatgtcctgcctagcctttttgaactgtttgaaaacagtctccagcttgccacagcccctctgttattttacagccagcctgcatcactcatttatgatgtccagccccttgtggggatttggatttttgacccctaaatactttagtggatttaagaccatttaaaacatttatgcagaagagatccgaggtccccaaacaactgggtgtataagttgtgtttaagttgttcctcattctcatttattctaatccgggtgtttttctatatatatatatttttaaacaaatcttagtgatcaattgcacaggtgtttttctgttggagcaaatcttttcagtttaggcttggtaaaatcgaaccatcagatacttttacagaaagagatttaggagttgatgttcttttattacaattaaatgcatacagtatttttaaaggaaaaaacctgaatcttgattgcattgttttatgatacaacaatctttaatgaaatagagtagtcaatataatttgtattaatatatctctgcccacagacaattataaattcattaacccccagaactcttggctagacttcataaaggcaaaaactgtgtttgccctgttaactgctttatcccaccactagaatataagcttcctgaagacagaagacttctgttattttgttcacagttaccaagcatgcctactttgttaaatttatgaaagaactttaaaggtacagttggcccacaatataacaatatagcaatataaaattacaacaataaaaataacacaaaaatagtgtaacaactacttatatagcatttacgttgtattaagtattatgagtcatccagagatgatttaaagtaaagtataccacagcatatgcctagtttatatacaaatatgatgccattttatataagggacttgagtatcctctgattgtggtatcctggaagcaggggataccggaaccaatcacttgaggatactgaaggatgactgtatggctgatttcctgtaagaggcattttcttgaggattctttcaaaatcaaatgcttgtatatttgttgtgttaaattactaaaaggattctcttgtgaaaagtatcatttaaaaagattggattttcccaattgatgcaccaaagctttcatctgaaatgaacttgcacatgtgaatcatcagatacagtaatatacactgtaatattttatttcttttttttttttatgagacggagttttgctcttgttgcccaggctggaatgcaatggtgcgatctcggcacactgcaacctccgcctcccgggttcaagcaattctcaagtagtgagattacaggtacccgccaccacgcctggctaattttttgtatttttagtagagacagggtttcaccatgatggccacactggtcttgaacacctgacctcgtgatccacccgccttggcctcccaaagtgcagggattacaggcgtgagccaccgcgcccggccaatattttcttattatgtaataggatctagaaatgttgctcttcctcacaattctcagtattacttttcttttttttttcagagtcagaggttccggttgagatcaagttgggagacacacccttgttcattctccttgagaagcagctattatcaacagaacattgacagaacctgtgtttggggaaaggactgatggctttgagtctaggttggaaagcacacaggaaccactgtggtctcctcttgcaggctctgcgaagcagtggtcttctcttgtttccctgtggccagtgtccctggagaggagctggaagctttttggaccctgagataaaggctttcctggaggagaacactgaagtcaccagcagtggtagcctcacccctgaaatccagttgcggcttttgacccccagatgcaaattctggtgggagagagctgacctgtggccccacagtgatccttactgggcaatctactggccaggaggccaagccctgtctaggtactaccctaatgaaacctttaaggcgctacagatctttgctgttttcagttccctccaacctctacaaaaaaccagagcaatgctaggcgtggtggctcatgcctgtagtctcagtactttgggaggctgaggctgtaagctgtgatcctgccactgcactctcgcctggcctgtctcaaaaacaaaacagaaaccggcaaaactcagtcttgttgttttcttttttctttctttcttttttttttttttttttggtagagacaggatcttgctatgttgtccaggctggtcttaaacatctggcctcctcaacctccccaagtgctggtattacagacatgagcctctgagcctagcctcaggttagccatattttttgttgccttgttgcgtaatttcccattctaacccaagcttatcaagctattttcccaagtaactgtctccccaagagaaatcctagagtcagctgtcaagaccctggatagctataagtgatccagaaatctcacctgttaggaggttcatagttcatagcgcatgaccattgcagagttcctagatggaagctaaacacccagtcctttcgctctcctttaattcagtgaatgtcgctccataaacctcacattccttccagagttgcttattttcccataaaacaggagctgtgagtgagtgggctgttcaaagtttccctcttctgttgggtgcagtgcctgtaatcccagtgctttaggaagccagtgcaggaggacagcttgaagtcaagagtttgagaccagcgtaggcaacatagtgatacccctatctctacaaaaaaaaaattttttttttttttgagacagagtctcactctgtcacccaggctggagtgcagtggtgtgatctcggctcactgcaagccccgcctcccgggttcacgccattctcctgcctcaccctcctgagtagctgggactacaggctcatgccaccatgcccggctaatttttgtatttttagtagagatggggtttcaccatgttgatcaggctggtctcgaacttctgacctcgtgatccgccctcctcggcctcccaaagtgctgggattacaggcgtgagccaccgcgcctggcttaattttgtatttttagtagagacagggtttcaccatgttgaccaggctggtctcgaacccctgacctcaagtgatccgccagcctcggcctcccaaagtgctgggattacaggcatgagccatcgtgcctggcagtagcagctatttagacagggcatgtatgcctctactttgccatagtgttaactggttgatgtcaagtcccaggttcttagtgccatcaacaaagaattggacatgacacatacaagtagcaaggcagcaaacagtttgttaagcagaatgcaatcagcaacggatcaggctgacctgcgagtggtatcagccccagtttgttatagttcatggccttttatatgttttttcctcacttgcttaaccttactttgtttttcgtaagtgaattgctcatcctggcctttccctcattgtgcctaaaccgcactttatttctcataagctaattgtgcatccttgcttaaccttattttatcttttctgacaaaattgctcatctttacttttagttcttgtaaccaaattgctactgcaacccctttccacttattttccttatcttgcatgttctaactcattgcttactcccgtatctcttactgcttactgtcttatttcatatgtcctgtttctgctatcttgtatgctttgcttttggtattgcttcagctagcctatgtccaacgggtccccttcacccctgacttcctctgccattctcctgcctcagtagtacccactgttccttattactccaatccgaagatcaagagtcagctgaaatttgttatttcagcgtttctccatccctcttcgcttgtttggtaactatttagctccagtccaaattccttggttgaattggactttgagttttaccagagaggtcattatactacatttcaagcagcaggaaaatcactctatgatggagtcaagaggagacagtgactcttggattgagtttactaattttagtctttgttttagcagtattttgtcagtcttaattcgtggtgctcggtagtttctggaacatactaagtattcaatactttgtcagccgaaatgagagactgaggcatgagtctcaaccagtcaaggtttgttaagcccaagaaaaatgcaagtcacagaaaagtttgtggcctgtgctcttctaagaggtttttaggaggcacagtatttatacatttctttttctttctttttttttttttttttgagatggagttttgctcttgttgcccaggctggagtgcaatggcacaatcttggcagactgcagccttcccctcccgggttcaaacaattctctgcctcagcctcccgagtagctgggattacaggcatgtaccaccacgcctggctaattttgtatttttagtagagacggggtttcaccctgttggccaggctggtctcgaactcctgacctcaggtgatccacccaccttgcctcctaaagtgctgggattacaggcgtgagccaccacacctggccatttatacatttcttttctttctttctttttttttttttttgagacagagtcttactctgtcacccaggctggagtgcaatggcttgatctctactcactgcagcctctgcctcctgggttcaagcaattctcctgcctcagcctcccgagtagctgggattgcaggtgcccgccaccacacctggctaatttttgtatttttagtagagatgggatttcaccatgttggccagactggtctcgaactcctgacctcaggtgatccacctgctcagcctcccaaagtgctgggattacaggcaggagccactgtgcccagcctacaacttttttttgaaaaaaattgacttgaatagcataatcagtcagttgtgtggtactgtgcttcacacctgctgaagagaaagaccaaatgactaggtcctttcttctgccacctctgcccagctctggagatggactttttgtgtcactctagtcagaccaaacttgccaaggttggaccaagttctgctacttttcactatttcttttgtccagtcaacctaaagacatctcttttctttcttttccttttcttttcttttttctttttttgcatacctcttatttgctgagaccagctcggctggggagaccctaacccagtgacactagaggaattaaagatacacacacagaaatgtagaggtgtgaagtgggaaatcaggcgtctcacagccttcagacctgagagccccgaacagagatttacccacatgtttattaacagcaagccagtcattagcattgtttctatagatattagattaactaaaagtatcccttatgggaaatgaagggatgggctgaaataaagggatgggttgggttagttatctgcagcaggagcatgtccttaaggcacagatcgcccatgctattgtttgtggtttaagaacgcctttaagcagttctctgccctgggcaggccaggtgttccttgccctcattccggtaaacccacagccttccagcgtgggtgttatggccatcatgaacatgtcacagtgctgcagagattttgtttatagccagttttggggccagtttatggccagattttggggggcctgttcccaacatttatttttcctcatctctctgagacatgtttctcctttttaatttaggtatcttttggataatcctgatgttgtcagaggaaaatctgtattagatcttgggagtggatgtggagctacagctattgctgctaagatgagtggggcatcaaggatcttggccaatgacatagaccctagtaaggattcatattttaaaatatttaaggctcatcttttttttttctctgggataaatatgtacacatgctcagtgtggtagcttatcgttatatgtattttgtgattggacattgtgaatctctgtgcactgggacattatctgtaggaatcccctgaggtctgagtagatggtgcatttttcccaagaggatttgtgtctgccagacatccagagtaagcacttatgttaatttatgggctaggaatttcctgaaatatgtaaatagtgtttatttgaccccaaacccaagtgagtattgacctgtctttgagggttatttttattccattagaacccaggctgagacaggtaagtttttatttgatctgattttcttctggtctaccctttcactgagaatatagtccttgaaaacctttattttattttatttatttatttattttgagacagagtctccctctgtcacccaggctggagtgcagtagcacaatctcagctcactgcaagctccgcctcccgggttcacaccattctcctgcctcagcctcctgagtagctgggactataggtgcctgccaccatgcctggctaatttttttttttttgcatttttagtagagatggggtttcaccgtgttagtcaggatggtctcaatctcctgacctcgtgatctgcccgtcttggcctcccaaagtgctaggattacaggcatgagccaccgcgcctggctgaaaacctttattttataaaggagtctcagttctttttttttctttttttttttttgatacagagtctcactctattgcccaggctggagtgcagtggcacggtcttggctcactgcaacctccacctcgtgggttcaagtgattctcctgcctcagcctcccgagtagctgggattacaggcatgcaccaccatgcccagctaatttttgtatttttattagagacagggtttgaccatgttggccaggctggtcttgaactcctgacctcaggtgatccacccgcctcggcctcccaaagtactgggattataggcgtgagccactgcgcccagccaaggggtctcagttctaatttattgccatgctcaatcaagcccaagtctcgtttccctgtccacagtaaaaaaacaaaatcttttggttaatgaaatcagcaaatattcctaaaagtcccagcatttctaggtgttttgaattgtttgttttcaggatatccagtcatgtatttggaaattgtggtatagcttatattgggataacctttatacttctctactttaaaaaacaactttcatcaaaaaggaagaaaaatatattgttagcagatcttctaaattatttaatcaacatggaattataacagcctagcatataccaattcattttgtgctttttttttttttaagttgcaggaatggctattacactaaattgtgaattgaacagactgaatccttttcctattttaatccaaaacattttgaatttggaacaagataagtgggaccttgttgttcttggcgatatgttttatgatgaagaccttgcagatagtcttcatcagtggctgaagaagtgcttctggacctatagaactcgagtactgattggtgaccctgggcggccccagttcagtggacacagcattcagcatcacctgcacaaagtggtagaatattcacttttggagtctactaggcaggaaaacagtggactgacaacaagcacagtgtggggttttcagccttgagttgtcaaagtgcttccaagtatgaatatagtaatgtttggatctgactctaaaagttttctctataggagatactctccagtttaatgaatgtaattcttgttaaatggaaaatcttgtttttaaaatatgaaggtttagagttttgtttacttttgtcatgtaactggttctgtatttctatgcatgccaattatacacatctctatctgcatttttttttctattttaaccgctgaaggaatatgattatacaatgccatactcaatggtggcagcatttaatttaagtaatggagaagaattaaacattgtagctggatctgtttctgtagttgaggacaactgtgatgtaactttgaattaaacaaacaaaacaaaacagaagaagactatatatatattttttctttttttagagacagtctcactttgctcccaggctggaatgcagtggctattcagaggcttaatcattgggcactgcagccttgaactctgggcttttttttttttttgagatggagtctcagctctgtcgtccaggctggagtgcagtgactcatgtctcggctcactgtagcctccacctcccccaatcaagcgattgtcctgtctcagcctccagagtagctgggattttaggtgtgcaccaccatgcctggctaatttttgtatttttagtagagacggggttttgccatgttggccaggccggtctcaaactcctgacctcaggtgatccacccgccttggcctcccaaagtgctaggattacaggtgtgagccaccacgccagcctgacgatgttttttacttctatcacttccttttgattttttcttatagcttctatctctgcttacgtcacccatcattcttgcgtgttgtatgcttttcgcattagagccctttgcatgttaatcagttattttaaatttatgatctggtaattctaaaatgtctgccataactgagtctggttctgatgcttgttttcttttcagactgtttttttgtcttttagcatgccttgtaattttttgttgatagctagacatgatgtattgcataaataaacaagtaaactaaggtagcatgaggttttaaaatctgggtagggctactgtttgctgtagagtagatattacaggctaaattttcctctagtgtcctggctattgtctcctctgttatctttgagtttccctagagattccttcttatatagagtctgaagcttgcagtttttttcacctgtaattccctgttattatacagtagcctaactgatgtgataaggtatgggagaaggtatgttctatagtcctgtgattaagtctcagtcagttaagtcagcctgtgcccctgctgtgaccttcacaagtgctttcagcttttcttttgtcactttggtgagacaggaaggctagaggcagctggagttgggtgcttcctttcccccaggtcaacgaggctctggtaaaatagtttcccttgagaactggcttttgttaaggagaactgaacacttgggcatatttcaaaatggttactttccctatcctcataccagaagaggggatttttctctgatcctcaccctgagaacctggtaggtatcctggaggtaaaactatgaaagtgtggtgtctcccctaggagtgggccccctggagtttgtttgttttaatttaacaaagtttaattgagcaaagaacaatctgtgaattgggcagctcccaaaagcagaataggttcagagtgactgcagggttgccacacctggttagataacgtttatggacagattcctagagcttttgattcttttttttttttttttgaggcagagtttcactcttattgcccaggctggagtgcaatggcgtgatcttggctcactgcaacctccacctcctgggttaaagtgattctcctgcctcagcctcctgagtagctgggattacaggtatacaccaccaaacccagctgggattacaggcatgcaccaccatgcccagctaatttttgtatttttagtaaagacagggcttcgccatgttggccaggctggtctcgaactcctgacctcaggtgatccacctgcctcagcctccccaagtgctgggattacacgtgtgagccactgtgccaggctggagcttttgattcttaagtccatccacatggagcctccagcaactcaggaattacagcataaatgttcctattggtactggctccagcaacaggcttctgctccctgtaagctatggttctttgtatttgcgtttctaatttgtgaggcattctctctttaaccttaattctctaatggatctaagtgttgttgacttttcagtttattgagcttttttcttattgtgaggatgggaatgatgacttccaatctctttatattagaaaatataaatcagactagagactggaaatttttgttgttgttgttgggtgttttgttttgtttgtttttagacaggtcttgctctctcatccaggctggagttcagcaatgcgaccgtgctcactgcagcctcgactttctaggctcaggtaatcctcccacttcagcctccttagtagctaggactgtaggcatgcaccaccatgatgcctggctagtttttttattttgtattttttgtagacatggagtcttgctacattggccaggctgggtattactgggtatttctttctttcctcctttatttctttccatatttacttattcaatgaatatttgagtgcttattatataccaggcactgttctaggcactggggatatggggatacagcaatgaaaaaaaaagataaatactttgtccttatgaaatttgtattctagagtagggagacataatgaacaaatgaaaacaggcatcagatggtgataggtagtaaggagaaaaagaagtaagggtaatagggaatactgggtactggatggggtacagatattttaaacagagtggtgagaaatagttaatacagctagcaacataaaaaaggagaaatatcaaactgcaaactgttttaggaagataaatccttcatagacccaaagaagctcacaatttagatgtcgaaactagtttctgcaaaaaggggaaaatgtgattgacttggttaaatattcagtattaaattttattgaatttgtctttagaaaaatttcatagttagaacaggccttacccattttgcacatatatacatatgcaccacctttgcagtggcaacatatatatccacactataaacataccacatttataaatcttgtaaggacaagaaatggagttgaataagtaccccccaacatatacaagaaagttagcatacttaccccgtttttcactacatcagaggcaaaataagaaatcttttaagaaaatctcaagactggctcatggcaaaatgaatatgctaaatttgggggttggtttaagcgtggtatgtgtcaggtaattttgtgattaccaaaaagttttcacttgaaaactaagacctttgctgtttatttcacaatgtgaaatcaataaacctgaggatacaagtctctgtagtgatattctgtatttactcatttttacacatttttgaatgcaattttgctaaggaaggaaagcttacagatgcataaaatgtaactgggaagagtagccataaaaatcaatgaatggatgtggctgggcaagagcctctgtaatactaatacgctgaatggctaataagtcacttcatttcggtgaaacaaatacctaaattctttgaagaattaacaggcttgatgttcaggtctgcttttggcaaatgggcatttaaatactccaagaaggtaagagccagaaaataggaaggtaactatgcttttagaaatatgtttacttagattctcccaaggtttatacttacaggtaaacttagaacaatagctcaaatacctacataggagaaggaaatctcaagggaaaacagttaattttaaagttatttaagaaacagaatccaacaccatagatcagagttcatgctaggattatcatttcaaaaataatgactcatccaacagatatagaataatagcactttaaagatgtttaagagtaaagcacaaaccatgtatataccaagacttagctaattctctgagagttataacttaagacaataaaataattaaaaatagtgttaacattaagtagaatgcaaatctctatagatggtttcctgggaaagtagttttgataagctttcctagcattgatcatcttcaaaaaagcatcaataaacagtccatgtcacttgctttagtttgtttgggcctactaattgctccaacacttctcgggaatgatctataaaagaaaacaatgacaatatattaattgacaataaaaaatgtttaatgtttcctcatgtctaactggaggtgatgttaattattatacagttatttaaaggattaaaggaggtgatctataaagcacaatatacaactaactcactaataattaattaatggtagccctcactattattaggtgtagtgcacctatcatggtattacttgtttaaaaaaaaaaaacaggcatttgttgttttctctgtaatttcatcataattccaccaaccagagtaatggtctaatttcaccattaacctgtgttaatggttaataacttttttcaggatcttagccggaaatagatgattcactaaagtggggtgactgaacagcatttaatgaagggaatatttaccaaaaaagtaggattaaagaaagccaataggtacggtaaaccaccttgggaagctgcaacacacccaaagggttagaggaggtagtagtcaccgaacgtgacaagttgacctgtagctgaacatttttccatgtctgtataatactactataaagcatgattttaaatagataaccattatataaatacactgtaatttaaccaatctatattattggacatttagatgttttcagtttttcacaatgtacagtcgtgattttgatatggtttccatcctagttttaggatgtcttttaaaaatctgaattaaagcaaaaatactgataaaattttgttagtttaaatattactcataagtttaataaacttgtttccatagatacaacctatgttttatgtacaacatatctctaacctagtcttggaaatcctgtaatttggtggttcctagacagatttcacagaccagtagaaaaaaaaaaaaagatgggcccaacatatacagtgacaaaattttattttaagtttaacaaaattaagcaaaaataccaaggtttattgccagcaagagaaccagagagtgtatagaaatgaaaagttattatcattgggaaaacaaaggtttacaattttttaaaaaagcagctagtaagataaatgcagttttattcatggtcataaaaatattattggttattgtagaggaaatctcaatcaaagatgggttcaaattatgttgaaagtaaaagaatggacaaagacataccatttaaatggcaaccatgacaaagctgggtggctatagaagaagggggaaacactttccaactctttctgtgaggccagtgttaccctgataccaaagccagacaaagacatcacatgaaaaagaaaactgcagacaaggatcttttattaatgtagactaaaaaatgctcaacaaaacaccagcacaccaaatccagccactagaagaaaggattacataccatgaccaactgagatttatcataggaatgcaaggttactttaacatctgaaaatcaattagtataatatactgtgttaatgtcctattgctgctgtaacaaattaccacaaatttagtggcttaaagcaacaaatttgttattgtacagttttgaaggtcagaattccaaaatgggtctcactgggctaaaatcaggtgtgggcaggtctgcgttactttttagaggaaagtcttatctttttttttttttggaggctctacaggggaatctacttcctttacttttctagcttctagaaactaccacattccttgcattccttcctgcttatttaaagtgaacaacattgggctgggtgcggtggctcacgcctgcaatcccagcactttgggaggctgaggcgggcagatcatgaggtcaggagtttgagaccagcctggccaacatagtgaaacccccatctctactaaaaatacaaaaattagccgagcactgtggcatgcacctgtagtcccagctacctgggaggctgaggtgggagaattgcttgaaccagggaggcggagattgcagtaagccaagaccatgccatcgtactcttgcctgggtgacagagtgagactccatctcaaaaaaaaaaaaaagtgggcatcattgagcacagtccttctcaagctgccatctctatggtcctctctccttctacttttaaggacccttatgattattttgggcctacatagataatacagaatgatctccctacttaaaaatcaactgattagcaactttaattccattggcaaccttatgtaacataacatactcacattttgggcattagaacgtggatatcattgggtgggtgagagcattattcagcttaccacctacaccattctaatagaacaaagaactaaaaccacatgatcatctcaatagacaaagaaacaccaattggctgggtacggtggctcatgcctgtaattccagcactttgggaggctgagggcggatcacctgaggtcaagagttcaagaccagcctggctaagatgggaaaaccccgtctctactaaaaatacaaaaaaaaaaattagccatgcatggtggtgggtgcttgtaatcccagctactcaggagaccgaggcaggggaatcgcttgaatccaggaggcagagattgcagtgagctgagatggtgccactgtactccagcctgggcaacacagcaagacccagtgtcaaaaaaaaaaaaaaagaaacaccagttgacaaaaaccaatgctcattcaaccaactaggaatagaagataacttcctcaacctgataaagggcgtctatgaaaaacccatagatggcaggatgcagtggctcatgtctgtaatcccagcattttgggaggccaaggtgggaggatcacttgagcccaggagttcaagaccagcctgggaaatatagtgagaccctgtctctgcgaaagaaatttaaaaattagctgagtgtggtggcacatgcctgtagtcccaattacttgggaggctgaggtaggaggatccaattgagcctgggaggcagaggttgcagtgagtgtgttcacaccactgcactccagcctgagcaacagagcaagaccctgtctcaaaaacaaacaagaaaaacctatagctaatagtgaaaaattaaatgttttctccctaggatcaagacaaggatatccacacttttttttttttttgagacagagtctcaccctttgcccaggctggagttcaatgatgtgatcttggctcactgcaaccctggcttccaggctcaagtgattctcctgcctcagcctcccgagtagctgggattacaggcgcccgcaaccacgcccagctaattttttgtatttttagtggagacggggtttaaccatgctggccaggctggtcttgaactcctgacctcagcagtttgagacctgatccacctgccttggcctcccaaagtgctggggttacaggcgtgagccaccgttacccgccaggatgtccactcttgccatttctatccaacatagaaatggcatgtaccagaggttccagccatggaaattaggcaagaaaaagaaaaggcattcaggttagaaggaagaagtaaaactatctatttgtagatgttatactgtgtatacaatatcccaaggaattcactaaaaaaatagaataaatgagttcagcaaggtacaagaacaatatataaaaatcaaatgtatttctatacatcaacaatgaataatccaaaaatgaactagaaaataactccatttatgttaccatcaaaaagaatagaatacttaggaataaatcaaatgaaagtgaaaaacttatactctgaaaactataagactttattgaaagaaattaaagacctaaataaagaaatccaaaccagaaggcttaatattattaagatagcaatatttcccaaattacctatagattcaatgaaattcatatcaaaatacaagctggctttttattttttgcagaaatcaataagatggggcctggtaaggtggctcacacctgtaatctcagcactttgggaggccaaggcaggtggatcgcttgagttcaggagtttgagactagcctgggcaacatggcgaaaccccgtctctactaaaaatgcaaaaattagccagaatttggcccccccannnnnnnnnnnnnnnnnnnnnnnnnnnnnnnnnnnnnnnnnnnnnnnnnnnnnnnnnnnngcctgtgagtggttaatcaacctccttttttcttttagctggtgtgtctacaatcattttggcatttttccaagttgtgaatatgttatcaaacatatataaaatttgtcttctgtctacatttgtcactattctgttttgaattcactattgcacattataggaagatgcttttccctccaatagtaagcatgtaacatttttatgtaattaaaaatttttgatgccagatggcagtgttatattacagtctccttaggcagcttcttcccatgaagatagagtatttaggactgtgggtttaaataagaatattcaatgcctttattatgctacagggaaaaactatggggtcgctaagtatttcataatctcttggcagaacattttatagaaacacatactctcttggccgggcgcggcggctcacacctgtaatcccagcactttgggaggacgagacgggcggatcacgaggtcaggagatcgagactatcctggctaacatggtgaaaccccgcctctactaaaaaatacaaaaaaattagctgggcgtagtggcgtgcacctgtagtcccaactactcgggaggctgaggcaggagaatggcgtgaacctgggaggcggagcttgcagtgagccgagatcgcgccactgcactccagcctgggtgactgagcgagactccgtctcaaaaaaaagaaaaagaaaaagaatcacatactctccagactgaaaaagggctaacgggtcatttatgctaatcacccgactgatgcttgatgtcaccttcctatttgtttctctatcctagtaacagttaagccactttacattaaaggctcaggaaggaattatagattgtggttcagatgacttaggttttacttccagttctatcaactatttctaagatgtggggcaagccacttaaatcaattgtatctctgttcccttatctttaaaatgagggagttgtatagatgaccttgttggggctcagaaaaggattccccaaagtatggcactttggcatgctgagtactttgaactaaaggacattggaaggcctcagaatccacctcagaaccaaggtctctgaccttctcctgccctcctatctcttacccttcattctccgcaagtgagtcacagaaaccaggattcctcttccccaaggtgggtcacagaaactagaacccttttccccaaaggaagacataaaacctacaaatattactctaaacttccccagcctttctgcctaggagctggccataaagaaattctctgatgtacccttgtcagataggagatcataaggccctcattccagagtggccccgccctataccctggaaaaagg

SEQ ID NO: 795 - DNA, 394 bp, Homo sapiens
gtatcttttggataatcctgatgttgtcagaggaaaatctgtattagatcttgggagtggatgtggagctacagctattgctgctaagatgagtggggcatcaaggatcttggccaatgacatagaccctattgcaggaatggctattacactaaattgtgaattgaacagactgaatccttttcctattttaatccaaaacattttgaatttggaacaagataagtgggaccttgttgttcttggcgatatgttttatgatgaagaccttgcagatagtcttcatcagtggctgaagaagtgcttctggacctatagaactcgagtactgattggtgaccctgggcggccccagttcagtggacacagcattcagcatcacctgcacaaagtg

SEQ ID NO: 796 - protein, 129 aa, Homo sapiens
YLLDNPDVVRGKSVLDLGSGCGATAIAAKMSGASRILANDIDPIAGMAITLNCELNRLNPFPILIQNILNLEQDKWDLVVLGDMFYDEDLADSLHQWLKKCFWYTRVLIGDPGRPQFSGHSIQHHLHKV

SEQ ID NO: 797 - DNA, 127767 bp, Mus musculus
  misc_feature (1)...(127767): n = A,T,C or G
atgacatgaaaaattaattttcagtgaggctaattcaacaataatttataaatttggggtttacattatgcacagatttgtataccaggtcagaggaactatgtacataccaagaatgttgttctttgtaactcaaaaggttaaaacacagatataactctgcctctccttctagtatctgtttcttcttcagcagctagccagacttcaattaggatcaatgttctcatctgtaaaatagggttgattgtttttatatattttttaaattggtaatacatagtctttattaggaatgctaagaattgttaatgtcttatagtaacaattgataagtatttactgtgttcacattgcattgtgattttgttttattttagtaagatggagtctcattagatagcccagactttcctccaagtctcaatccccctgccttagccttccaaccactgttattactgctatgtgtcagcatgcctggctttggtttagcttatgtgtcaaattctctagtacctagaggtacactgtagttgatattattctctattttcagtaatgaagaaatgcatttctttcttctttttttttttttttttggttttttggttttttgagacagggtttctctgtgtatctctggctgtcctggaactcactttgtagaccatcctggcctcgaactcagaaatccgcctgtctctgcctcccgagtgccgggactaaaggggtataccaccatacccggctaagaaatgcatttctaatcaccatgtttggattatactcatctgatcataaagctgattctagtgatcataaggtattttgtgcttttatatttctgttgctatctaaaggaagctataatgtaaaaatacatactttacatactgctagctaaaatagaggcatgactttgaattattgggtaaatatcaacataggaaaatatgctatattaaggacatctggtgtgagcaacaaatgtcctaagttggaagagatgagttgcaggtgtccctcaggtgtcctgttgccagaacacagggaaaaggaatggtcataggtcaccgtgtccattgcattgaaggaaagcagcaggtcactggggccttctctccagttctagtgtctgaatggatgttccttccttaaaagccagtcctacaaagatatcaaaaatacacattagaaaaaaggcagcaccttcaataaatggtgctaggacaatctgtagaaaaatgaaactaggttcttatctctcaccatgcacaaagctcaactccaagtggatcaagaatctccatgtgagacctcacacttagaaactgccagagaaaaatgtaagcagtctacttttatagggagacacatgtaaggacattctgaacagcactccagtggcacatcagtccacaaatgagataacatgaaaccaaaaggctctctacaacaaagggaactgtcaattgagtaggaggcagcccacagaaagggggatttgccattcatacatttgacaagaggattcatgtcttaggatttctatcgctgtgaagagactccatgaccgcagcaactcttataaaggaaaacatttaagttgggactgccttacagtttcagagagttagtccatttttgtcattgtggggatcgggtggggagcatgggactcaagcagatgtggtgaaggtggagttgagagttctacgtctggatctgcaggcagcaggtcttcctgtgactctgagccactgagcccgagcttgagcttctgagagcaaaaagcccagccccttatgacgcattgatatagggtactggctagtttgtgtcaacttgacacagctggagttatcacagagaaaggagcttcagtagaggaaatgcctccatgagatacaactgtaaggcattttctcaattagtgatcaagggtttcaggccccttgtgggtggggccatctctgggctggtagtcttagttctataagagagtaggctgagcaagccaggggaagcaagccagtaaggaacatccctccatggcctctgcatcggctcctgctttctgacctgcttgagttccagtcctgacttccttggtgatgaacagcagtatggaagtgtaagccgaataaaccctttcctccccaacttgcttcttggtcatgatgtttgtacaggaatagaaaccctgactaagacacatagtttttttgtttgtttgtttgtttgtttgttttgttttgttttgttttgttttacaaagccacaccttctcccacaaggccaccttactccatcaagagcacacctcctccaataagattgatcacacctattccaacaaggccatacctcctaatagtgtcaccccctatggacctatggggacaattttaattcgaaccaccacaataagtatctacactatacaaagaactaataaaaacataaacatcaagaaaattaagaaaaattaggctatgaaactgaacagggaggtctcaaaaaaagaaaaaaaaagaaatgcagatgtttagcaaatacgcttaaacacattcagtggccttagccgtcagggaactgtagattcagactatcttaagattttatgtcaccccagtcagattggccctcatcacaaaatcaaatggtaacaaatgctggtgaggatgtgggaagaggagaccctgcacactgttggtggaagaataaaccaaagccaccactttagaaagtcaatctgaaggtttgtcaaaaaagtagaactcccatgtgacccagctgcccactcctaggcatataaccaatggaacctatatccccgtacagaggtaattacacacccacgttcattacaatatgcaggaaagggaagtgccctcggtagctaccatctgataaacagataaagagaatgtagtacatatacacaatgcatttctattctgtgctgagcgaataaaagcagcacagatttagtatcagagatattggctcaaatctcaggtttgtaactcattggctcattgaagaaattcctctactgtgaacattgtccccccttggagaacatgtactgcctgtgctggtagccactaatctcatgttggtattgtcattacaatcatgatacacattgtgatcctctactgcccaccacatttcaagagcttcactgttctgggtggctcacagtcatcatatgtcacatttgcgtcgtcgtggtaaatctactaaaacccagcaaagctcttgttcattttaactggagtagtgcttctgatttgtgtgacgcaaaaccataaattcatttgtatctgttctctcctgttcatggctatttgttgattcggcattcaccttgtgccaactcctattccctttcattctttgaatgtcccttgaggttagtgtccgtttactttcggatagagaggaaagcttgagcttgcgaagattaatcaatatggctaccaagatgcttgagcagctgtctgcagagaggagcttggagtcttcaagccactgtagagtgccacctcatttgaatgtctttgtgttagttgcttttctattgctctgctaaagcaccatggcaaaggcaacttagtttatctgggcctgtggttccagtggaatttgagtctttcatgacagaagctgtaggcatggtgactggattagcaggttgagagctcacatctggaactggaaacaagaggagagagagagagagacagagagagacagagagagagacagagagagacagacagacagagagacagacagagagagacagacagacagacttgagaatagctcatggctttgaaacctcagggaaatccttcctccagcaaggccacttcctaaacctctccaaacactgctaccagctggagacccaatagtcaaacatctaaacctataggggacactctcattcaaatccccacagccctcatcctcaaaaggtgtgaaagcatcatgtaaggcaaaagcccccacaccgttctcttctccatatcggaatcttcccaaacagtcacaaacagaaaaggggagtcctacaccattcctgtgtcaataaagtggaatcaaattccacatgagccaatccagaaaagctggccatagatggaggcaaggctttactcgtccctagtttgtgttgcaaagcccacagtataaacatagatagacaccagcggttcacctggatagctgatgtaaaggagggcaggaaagaaagacatactatagtctactttgaaatcaaagttataggactagggagatgtctcagtggggaaagggtttgctacccaagggttttgattcatcagcacccactcttgaaaagcagaaatggggcatctccaaggtaagctggctagctagactagagaaattagcagactctgggttcagcagaaacccctgcctcactatatataaacagtcaatgtaaactccaggcatcaactgttgaatctcacatgcatgcaaacatacatacatgtgtaaccatacacacaaggcacatgcacacccacccatccccccacacactcctgttatctaggtacccatgcacccactctcctttttattcagctggctgagttttctgtaattcctttcaagaaaaaaggagattaaattttatttgacagagtaccttttgaaataggaagaatggagaaatattactaagctaaatcaatttgaatattttctcaggctacactattgaattctgtgaagatagcatacactaaaaaatggcatccagcttaatcaggcagtccagggttgatgagatggtaggtgtctccagaagccctgagtggcacgctgctttctgagcagggatctgagggacagaaatagactctgccagcagggcagccagcgagagtgatgcttctgcccctctcaagaaaagtggcctctgtctgccacttgttcagaatttccacaagaattccggaccctttttcgtctgcactctctgtagcctaaagtaagagtggggcctgacagccaaccaggcctttgaacgtcaaggttagcttctctccgagagctgaaaacactgcttccaggaagaagttctcttatggtttgttttcttactagcagattcaactactgttaactggaaaaacagattttcaaaggacacaaagtctggcttccttttacaatctcctccacagttccccggatggtagacagcgtacctgactatgggtctcggatatcattatgtcggtctggctaggctgccacagcctgagttctagtttgaaagtgcacatgtgaaattgaaaactaatgttggagaaaaagaatagattgtgtgtatttacttctagaggggctcagtgtttattttgttggcagaaacctaagtagggttattatacgtcctttcagctggctgtcactttgttctcagacttgagttctgaactgtccagagtagattggatgggtctggtgaggaaacttctcggctatgtcaaggagctcattgtgggcttttatgtactgtgcctttagaatcagtcagggcttctccataaggtccctggaaaatatctactctggccattacttctcacgataacaaataaggaattatctcatgaaccagataggccatttgtaaatatctctttatctttttttagttgctgaggaccccagaggcaaataggttttgttgtctaattgttggggatcatccagcacctacctgtctctgtgggtttctgcctttcacgctctctgttttaccattctactgtaccttgtttcttcttgatcagttttattatcttggtttggaataagtttggaagaaagtagctgctgctgcttctccttcttctccctccctccccttctccttctccctctcctctctctcctttgctttcctgtctttcttctttgtttgttttgtttttcacttttaaggtcacaggaattgaacccagtgctagttaagtgcttgctattctacagatcctgatccgtagttaactgttgttttgtttagtcttgtcttgctaagttgtacaggcaggaattgaatttgtgatctttttgtcttagctcctgagtagcttcgattatgccatcctgctgtgcgagaagtaacttctttacaggggcattcaaatggtggccctatgcaaactgggcttcccagtcagtccttctgagccatcccaagttttgaattgagtacgtatgaattaggaaaagatgtcccttcttccacacagctcactttaacatgttgccttatgtgtcaccttctctacctgaagttccagaagaactgatggatctggcctggtgccatcccttcagtatgaaaaagtttgttttttgttgttgttggtattttttgttttgttttttctgttggaaaatattttatttgaaaaatttatttgtccacttatcctttcatgaatgaattagttttaagttgattttgaaataaatacttcaagtgcaagaaagccagagatgcgcaaggccattttaaggtctctcatgaatgtgacattctagagcgtgagtcagtcaatccgaagatgacaaaacacagaccgtgtttggtgccagaaaggaagtaagcaggttgttgtgactggtacagaaaagcatagtatggagatttgagagcctctgaagagaagagaggatggatcagtcattaaggtgagaactggaaagtgaagagccacagacaccaaggggatgagagagacactgaaaaggtggagctagaagtgcaaaggccttgagactttaagaaaagcaggtctgttgctaatgagcaaaaagagtcgagatcaggaagccggtaagttaagtacaacagaaggaaggacccggatcctttagaccactgtaggtgaaattttaccctaaatataatgggaacttattagtttaggatttatttatagaactggctaaaacttaaagactcagtctggctgctgtggggtaaaccatggaatggagaacagtccacagcagtggtgacaaggtcgtgatggtagaggtggagttagtgggcataacacatcagtgcgatgaaagcaaacttagtgaacaagaggagaaaccacaaggaaggaaaaggcaaggatgactctcagtctcagtgagtgagttggcagagtgaaaagttagatgcaccagtcacgtttcttgaagtaaggacagtctgtgatggtagagaagctgagagaggagagagggaacttaagaagtcccacccggacacgttcagttcattttgaaacatcccgggatgacaactggggagttaaatgtctgatctggatcccacaggtcattaggctgctattttaaatgtgggaggcagcactaatttgtcagtattgatgccatggcattttacagaaacctaggtgcatgatggaaatgagacatccaagaaccaagtcatgaagggcatacggagtttgggtgtgtaaggaaaaggcaggaaatggcattagaggactggggcttggtcagcgtgtgatgagagaaggtatttcaagaagaaaggaactgtcaaccacacagaggccaaatcacacacatactaccttcatacaatttgtttatagttggtcaccatggtgacaatactgcgtgctgcaactcagtgagttgtgtctctgagctgtgtaccttgcatacatactttgattagttaggattccgagacaaatttaggaggaagtaaatacttaatggtgcagctgtattttgtccccaaaggcagaggtcttccctcaccttcgcctctgttatattcactgctctgtctccagttctcagtactgttatgaatttcccagtacctggtatggagttgaatgtttgtggtggttcttcgccaggaatctaaccaaactgaagtccatctttgttcagggataccatgcccctggattctgccacctgtggtggccttctcttgacatcagatttattgtgatgaatattgctttttttcctagaatttagaaagataattttggatggatgaaactaagaatctgaaatacctttcttaacatgttaatcttgtaattgctatttacttactggtgcttttatctatgggggaggacaggttcctaattgttagctttgtgatgagctaggaagacatctttagatcatgtgaagaatgcctaaatttgttgaagcacagagccatgtcttggtattatacaaacatagggcacattgcatctgagttcatttcctaagcatcccttttctctcactgacagaattttcatggtactcctaaatgtagtggaccaggaatcccttgggcataggtggctctaatgcggtgcttgagtttgtagaacacttcttctcgagggaagctttcattctgtggttttcattgagtttctggaggcagagtccacagtagtgggacacaatgcagttgcagcagaagccccggggggctcatgagaacatgtcactgatgctagtgtaggtatggaccaattccaggcagcagtgtgtcctgtatggtgggcaagcaggtgacacttagttaccttccaggagctcctatcacaagccctccacagaactcttctatataaatccaagacagcggtgtcattaatttcaaacctgttccagaggaatgttctctgttaaagaggtaaacctttcagtatacagaaagaacacactgtgttcttaataaaaatgttcaaggggccaggccgtggtgtcctttaatctcagcacttgggcagaggcaggtggatctctgtgggtttgaggctgtcttggactacagagtgagtttcaggacagccagggctacacagtgaaacctgtctcaaaacaaacaaacaaacaaacaaacaaacaaaacccaaaaaaaccaaccaaaccaaaccaagccaatcaaccaaacaaaaaagaaatgttcaacagtattatcagaaatggagttgttaggatgcagatacaaaaggtgcctgcttgtggtcctgtgattggataccatgttgtaagttatgaataccctcccacttctttttaacaggaatcttttgtgtttgagcccaactgcctcttcaaagtagatgaattcggcttcttcctgacgtggaagagtgaaggcaaggtatggcataagacagcagcttgtcctgcctgctgtccaggtcaagccacttcccttcccaataggtggaccaagctcctcttgagggcatgcagaccacgcttcctccttcccttgagattcttcactgcatgatttcccgtcccactccttggggatacccttggaactgaagacattatacagtttagctctcagagattcaactggaggaacaaagcttgcattttttaaaagagctacaagtcattgggaaaaggaagttacattgttataaaagcttggacaaaacaggtctggtttaatcttgagagttagcaatattttctagaacgtaatgttcaagctgagacaaacatgatctgatgtgcagcgcagcgcacacttagtgaacactggagatgaaccaagacaggtggagttggcagtgtataaaaactggcgttattcctacttaatgttttatatatgcagatatttaatgatgcaaggcattattatgcatataaatgcagtaatactttataaacattttactaatcatttagaattacactcatatatatgtattcatatttatgtgtatacaaatatgaaatagttttgagtcttttctttctgatcattagacatcattactgttatttgctttgcattttgctatttgtatgaacagcgttgattttatctttagaaatgtttgttaatactctgggccaccaggctggcagaattgaagttcattgccggggtgtatgctctctctgcaggaaggacaagtgctagaatgttccctcatcaacagtattcgccaagcagccataccaaaggtaaatgcaattggtggtgttcttcaattttattttatttataatgtgtaagtgcatgcgtgcatgagtgtctgtgtgtgttgggatgacgtgagtgtgcatgtgctatccacgttcctgtggaattggttctgtctgtccaacttgacatgggttctgggaatacaactcaagtcatcatgcttgtgtagcaaacacttttaccctcagagccatattgctggccctgctgttcttttaaacatagatttacaagagtatatttttcatctataactcttaggtgacttgggttacattatttggatttcagttatattagcaatgttttaaccctttgctcttcatgtttaactgatgactgtgtgggtttacatggctgaggcacccatactgcttcatctgtgcactcaaaacactagtgcacacaaaaatcctggctgaactctgagagggaaggcacctggagcacagaaatcagggatcgtcagagattggtgtgcttgaagaagaagcggtctacagagtgctgtgcggaatttaaaaggtttctcttcatagaatgttcaaccacagaatttatttccctcactgtaactgccttgtgtggtttcagatttcccaaacaaagttctattcctgattgtttgtttgttaatttttacttgtcagttggcctctttcatgttagctatgtttcctgtgtaactacttattggaatttcctctggaaaacaagcgtggtattttatgtgggaatcagggtaaactttcacagctttccttccatgtgaggatgcaaacattatagaaatgcaagtgcttgttctttgtatccaagctgcatgtgagtcttaacttcatttcctcagagtagcctatgctagtgactgtggtggtggtggtctcattcctggtaaggaagcccaagcctgtgttctgttgtaacaggctccgtgggatattcatggacacaagcaaacaccagtacagtctttcctgaacatcaccaaagctgaacttttctgagagtgacaatcaaaaaattcagacaaggaggcgggacatgtggttcagcaatgaagagcactggctgttcttctagtggaccccagcctgataaagtcccagagccctcatgatgactttcacctatctgagcacttggcacaaacaatcatagacatacgtgccatcaaacaaataattgagatttatttttaaaagatgtatacaaaagactattgagccaagttttcttgaagaagaaagaagaaggagaaggaagaggagaagggggaggagggaagaggaagaagaagcaggagcagcggaagcggaggaagaaggagaagaaggaggaggannnnnnnnnnnnnnnnnnnngaggaggaagaagaagaagaagaagaagaagaagaagaagaagaagaagaagaagaagaagaagaagaagaagaagaaaagtatgatgctcttctgatgcagtttttgtgcactgtaatgctggggacttcagccctccaggttttataatagtgctagttcccctggggggttttaatgcagcagggaccatttccctttaggtatattttttgcatgaagtgtggtttcttttcaccgcatttttctccacactctgcaacctaccatattttttcctatttttatacatctacaggatcccaaaatcctggctgctctcgaagctgttggaaaatctgaaaatgatctggaagggcggatattgtgtgtctgcagcggcacggatctggtgaatatcggcttcacttacatggtggctgaaaatccagaagtaactaaggtaacatctcaatggcctccctccccaataagtgtatggtgtgtgtgtgtgcgccgcgcgcgcacagttgtttaatgtttaatataattttaaatatgaagttgagaattgtacacgcattttaatcgtttaaaagttcactgctctgctggaatatttctgtagaaaattcagcatcccaaatgctttcattacccatcacacacagaagtcagccctgcctggcatgatgtgttttcagaaaactagcccaggcctcccataacttgaatgtgcccaggagttcctgtgatcagtaggtctgagttaagagacaagagattccttttcagttaagctcagagaagcacactctgagtatcaaataccttggtcagtcctgcccaccagaaacaacgtaaaccatgaatatggcttaggtgtagctgtgtgcgagagagcaagcatggtatgcatgaagttctagtataaaaaaaaatgaaataaaaacataaaacggtaatgagtggctcagtagtatatactgtgacaagcgtgttcaatatcctgggttctaccctcagtgccagagaccaacatggctataactatttctgtaaaatatggttatttaacccaatatattctaaccattgttgttttagtatgctataagcataaaatttactaatgacatagtttacattcacttgttcatggtgtttgacatctagtgtgtatttttacatcaaacatgtcaaattaaaagtgcaaagtagccgctgtctaccctattgaacagtgtaaactcggttgcttaaaaatctcaatctcttttcctcagtaagctgtttgaagcattgagttaagacccatcttatatcatgatgcccattacgtagtaagaaaccattgccctagcaaggtagtccctaaagagattttgatgcaaaaatcttcccaacttgacttccaaacatatgtaatctatatgaaagagaccaagtcttttctatcatagagacctgggtttgggaaaggagaggtctttcattttccattaatctcataattagaaacacagcatagatttaatgagaaaggtagagatgctgagttgtataggaaggatagtcaccagctaagatcaggtggggaagcaaaggaccatcacagtcatggactctgggtctaacaagaggcagaattgagtgttgctcattctgggaccacggggcttactcaccatcacttgcatggcatggccctcattctagaagcactggccttaccagggatgtccttgcgcacgtgtcccagacccacagaggcactgatgcagagcctgcattggtaaaaaacagcttccaagtgactagtgtgtgtgtgtgtgtgtgtgtgtgtgtgtgtgtgtgtgtgtgtgtgtctcagaggctcttgctttgtgcctttggaagaaggcatgggccctccaaggacagcctttgctctgtccttgtggaagtggctttgtaggttttgtgcttttgttctgtgtcatctcagtttgggagaacagcttttacaggcctctcaagtttttatttctctgctcagacaggagcctaatttgaatggattattgaccttgatctagacaaatagctttgcatatttgctgcaaaggtctttctgcttgccgtttgccatagcaaccttgactcttggggatccgttctggctaactgtgaagagaatgacttgcttgtcacatacacatgtttggctacttgaaattttgcaaaaaatattgtaaactttgttgttttgtgacatcaattcctgacagaaaaacaaacaaacaaacaaaaacaacaacaacaacaaaaaccactgtgattccttctaactccagaatctgcactcgggctccaattagctgagcagaaatccgtacttttccttctcagccaactgggaacatagacaccatatttactcttctgtgtctcacttatttttttcttctgtgaaatgagacttgcataaaaagtacctgctgtacgattgtgagggttgctggacttgctgctttgaaaacgcacgatgcatttcatccccctgttagctatgatgatcccaaagtcagaatgtaagctggaggggtggggtgggagagatcaggatgagcctcctaccatcttatctctcggacatgacaaatagactgtggaataccaaagaccacatgggaacatagaccaaagcccaggcttaacctcacgctgtctgcctttgctcctcaatactggctacatcgctctaagacctaagctagtaaggtcctgggacaatgtctcaaatcagcaaatctcaggtgcttgtttcccataatttgattgctgtcgatcttggtccattgtgtttaagaatctccttttgggacatacaaaaatgaggaagttctatgcagaggagggataaggtgggcagtacatcctcaaagacaaaacttaactgtttttctttaagtagcagacacgttttaaaaaaagttttatttcctagaaaataaagactctaattttgttctgattttcagttcaaactcacagatatttaatcctactgtttttagggggaaaatattttagcttcttggaactgttacttagaagaaactgttatttttttaatatttctctactggtataaaatacaaataataaatctcattatccagactgaagagtgttagttagttaatgtccttctggttaatgagtgcttgctgacagcattaaataccatattttccccaactatgagtattaatttttccctgaatttttcagtgaatatgcatgtgaatgggtaatgatgctcatatcttgttatcaatacttaaaagcttatattagtcaacaccagaacctttatcgacttcagtattgacagtatctcctacattcccatttttattcctaatcttggatagatgcatccctaacagattatacaaaccgagaaatgagtgattgggttaggtaaaaaagatggaagagtccatcaattaactcaggtcaatgagaaaagcagagtagcttaaggctatgcaggagagaaggcagatagcccaagtttaagcctgggctttggtctgtcttcctgactggtctttggagtttcacagtttatctgtcatgtctgaggtggagaggtggatgtgactcagtgataccagtcacatatgagtggaaccaaggacccctgaattatgggatcacaagatatgctaatggcccaattagcccatatggaagatgttcatggtgagttcattacaaaagccagtaacagcaaagaagtggtttttatattaatctgtagagatcttgagtgctttggctgaaagaaactacttgtgctttgctttctggccgttctctcaatggctgagctgcagacattacatgtcatctgttggtgggatgtcatggagcttgttatatataccccagccattaaggaacgggctgctattaagcccacatttcatagctctgtgacttcccttaacctatcgcttgtctagtgctgtgcagactagcacatggacagcatctggaggaaacaaatagcagcctacctttaaaaggattgctctagaatatccaactctactagcagcaggcctttttcttttcactaggctttcatttgtttatgtaatgttttattataaccgacatgcacaggtttgaaaattaatagaagtcttttgttgtaagcctccaaatttggggcaaaagaatttactatctatatcaacatgtggcctggagattgagtttagtgtctgggtatccaagggctttgaatgtcttaggagcattccacatttctttctctgaccaaggagggaaacaggaagagagtttccagcactgcatttgattattgaagtgcttgaatctcctccgaactcctagactattatgctacagaacagtctgattgttctgaaaaactcacttctccaaacatttaggcgaagccaactttctattcatccagactccagaaggaccgaatttaactcaagagaaattttctgactctgagcgagtccttcaaattgttttcaaagagtgtctgcaatatgtgtgtgtgtctgtgtgtgtgtgtgtgtgtacatgcctcattttacatggctgtttggtgagtcagtaaagcccagatgattcaactttctccaagttcaggttgcaaatccttataaagtgttttctagtcatttgactgtgaaaatgtggctgtgttttttccaaaaatgcaagtcttatataagacatcctggaagctcagcttgtgcggtctccagctgctctctgccatgtaaacagcctagccttgccactcgccactgatttaggcttgtgctnnnnnnnnnnnnnnnnnnnnnnnnnnnnnnnnnnnnnnnnnnnnnnnnnnnnnnnnnnnnnnnnnnnnnnnnnnnnnnnnnnnnnnnnnnnnnnnnnnnnnnnnnnnnnnnnnnnnnnnnnnnnnnnnnnnnnnnnnnnnnnnnnnnnnnnnnnnnnnnnnnnnnnnnnnnnnnnnnnnnnnnnnnnnnnnnnnnnnnnnnnnnnnnnnnnnnnnnnnnnnnnnnccacctcctcccctctcatgtcttcatcttgaccttgccccttatagtccattctcagaatagcagctgaagataagcctcttcagatcaggggctttcatcacgtgggatgctctaaggcctccaagtctctatgaaatccagcctcatctgcttccctgcctgccttcacctccgttttcctcagccatgtttctgtcagatctctgtggatatgctggccgtttgctctttcccctgttataaaggaaggttttacgtttgttgtttgtttgtttgtttccctgttttttttccctggttctctttccatccctactggactattcactacctactgcagctcctgtcctctcaacacacttcagcccttccccattcgttcttctttccagaacagtttccagccttttgaaagtgctcaataaacgcatgcttactgaagacagctatgctggccaggctaatatatcctaacccagctggttaagatgacagtagtcttgccctaatttttgggaaatgggttccagtatcccacagtgaattcctaaaaccacaaatggtaccaagctccgcatgcacttctccattgtttcttcttcctgtaaatacatctgattaggtttaatttatgttaaaggaagtcgcaatacatagtgaattgtgaacaatagattgtgatagaattgccaacatcagtacagttatgcatgaggacattattaagtaaaatagggacttatttgagcacagcccatctgataatgaggtagcgctgagtgcccaacaagagggcggtacatcccagttgtttagagcaggacaatatgggatttgattctgctaccagagggtgtgcaagttataacttatgagtagcttgcttcatccattttcatttaatattttcagacatgagccactaatatcattgacagtgaaataagggtaagggggtgccactgtatcagctcggtgttgtacacttcgattttatacagactcgctgaggaggagctagggaaaacggtacttgacaagcaggctgagaaaatgtgatttgatggcagtccaaggggaacggaatgatctataatcccggggtgttatttttagagtcatttttcaggatgtaatgagattgctgccactgagagtccatgacaggacgggaggtttcgatgctgttctcttggcttcctcccaatcaggatcaccgtagcctgcttacctcaatacttcctgtccctccacttagaaaaatgtcgctttcctttcctctcctgaaaagccctctgttaaaaaagaaatgctaacaagttgctgccacctttatcccaaccccagggtgctgctgggtaaaaggtgtgtcttctctgtcctgtagctagaaacacttgagaagaagcaacctcatgctgaaagctttggccctttttccaagaaactgtaattaagctttttattcttcctccctgattcctcctccctgaaccatcttcatccctctgcttattattttatcataggctatgcaaattacttagttagcacgcttacatcttatttacttagaaaaccaactctggtttgtttttgtttctttgtttgattctcagaaggcagctagctcaggagggtttccatctccagcaaataggagttcagatgtcagttacagctggtgctgcacagtgcaaccccagtcactgtgctgtgcgccaggctcaagcacatcccacattcaatgcttccacacataaatctgctattttatagcaactcgaattttcctttgattatagaaataagctgttattgtgaggttcaaaatgcagagattggaactgagttcaggcaatttccatcccgctcattatactttcttcaggttgtcaatattgggagaacttcgtaaattatactttgtgactaagttaccaaataggcactagactaattactgcagaaattaagttatgaaaagtaatgtgttcttttttggggttcaaaaatgataatagggtgtgtgatttattgcaggcaatacagtatcattttaagaaactgagttgaatgttaaaggctccttgcttgcacttggattatgttgactaactacagaggttcctggagaaggaagggatttactctttgtttcactgggaaaacaaaagcagatctcgcttccttctgttggctctgctaacatcctccatgacctcaaagacctcagtggagttcctgcgtggatggccaagcactgaggaacttcaagggatcagactgagcttcagccagggtcttctagaggtgccagttctcgggccccttcttgcctgatagtgagaaatctagataaagaacctaggaaagtttcaacaggtagacctaaacccaagtcaccaattttcaagcccacaagtgttaaggtaactagagcatacaagtagacaaatgcagctccctgccctcccagcctgaacatgagttcaccaaggcagagcaaagaaaggcacctggggtaaaccagggtctgtgactctagaaagctcacactggcttcacaggaccccattttaaaatcctttcatacagtagtttgtgttagtttgggtatgatatgcccagggtcttgtgtattctaggcaaatgttctaccactgagctagacccccaaacattacaatggtctcaattttcagagtataggctagcggctcccagagccctcgcacctcccacagagcttcaaagtcatgtccaggcccaaccttgggccttctcaatcagcaacccatgttctggtgatccgatttgccctccacatgattgtgctgcaccctggaaagtgtggctatgggaaaacggtccaccagtagccttaatatcccaccgtcctatggagatctaggagaaggggcattcgcctgctggggtgagctgtgcttgccgccttaggcagctggctggtgcatctgaacctctctccccaccctcaatattcattaagtctcttcgttaccttgcctcacagtgaggctcaaacataacgagcatagaggatgtgtgtggatctgtgtgcatgtgtgtgtagggtgtatgcatgtatctgtgtgtgggagaaggtgtgtgtttatgctatgcatctgtgtgtgtgtgtctgtgtgtgtctgtgtgtctgtgtttcagggggaaggatgtgagaggagtctctctctctctctctctctctctgtgtgtgtgtgtgtgtgtgtgtgtgtgtgtgtgtgtgtgtgtgtgtgtgctcgagagtttcatgcttccaaaactagcagttggcattttcgtgccaaagtgttagatcccatgggaagactggagtgagcgtttacgtttctctgtttggcaaggatcgtagctagctttgagtgccaagcctcattgcatactgaagagtctatggaggtgctgaaaggtcatgacttgtgctcagcaaagaatgccttggatgctttaccttctcaggagattattgtatggtaagaccatgggggtcaaagtatggtcagggtacagcaggagccagtgtcagagtcaccaaggcaaaaaaaaaaaaaatcattgtgccaagatgctcaggtgcttcctgtggacactaaggtatgagtggtcctacgggagagcatgaaagtctcagtggttctctactcatgtgagctgtacacagggagaaagttttgtgaggcattggaatgttgagtccagattggtccccggttgccactagagaaaagaggttgccctgaatcaataaatgtaatgcaattttccctgtaccctcagtgagtatagtttttacaagggaagcaatcttttcatcacctaatcaaatgacaggcaaaatgaaataaaatggtcccaggattagctggcttactataatacagagctagagaaacagaataagaaaaccaggcaaaaagcatatatgaaaatatagacaaatgtaaaggaaaattgtttagtgcaatgcaccacaaacaaaccaaacactgtccaccggaaggagctgtccaaatggtgggagaccaggccctctgggtaacatttggatggatccagagagctagctgccaggttgtcagagtaaaggaaaggacattttattcatatggagtatctgcatgagaagttcaagagtggcttcacaatgagctgtgtctcatgacgtggcagtctgaaggcacccagggtccctaaattgcattatctcagcttgcactcatcagctgtgaggcatgagtcccatacaccaactcacttaaatatcagcatagagttgctactgttggttgtcaatcagtctgtgataatattgagctagtcgcctggcttaggtatatcttctgtgattagaaatctcaaactggagttaccaccgcattctgcataggaagtacagaagaatacagtcaaacaaaaccagcagtcccttaaaatgagttttccagttcctgtgtcatctcgtaaaaattgctatgaaatttgctttctataaaactgcttcaaaatgaacaaattgagtgttctttatgactctgtagcgttgtataaccacccctaccgtatagttctataacacatcgccatccggaaaggaaacccatccttccaccaccatccctgcctgcaacctgagctcatcctgttatcagttggcctcctgctgtttatcagcatagtgtatcacattctatcactaggagtttcaccacattcatttgctggtctttaaaactcggtcctggactcgaatgtcatcaagtttctgtgatcactgaggtaggcttccttggagttttagcttccttttctttggaaaatgtccagcatccgaagcacttccctttgaggatctgtggtgacaacgagggccatactgttcctggctggtgccctcccaccattgtgtttctggaatgtactggttgaggagcagaatctaaacctgcccagagcacgtattttgccctgattttcattccctccagcaggagagttaaaataatctccacggctcctggaaggaaaaatgtcactagccttaaattacttcttcattttccatagagctccagtttttactgctagcaaaaccagctattgggaacattgtgtgtgtgtgtgtgtgtgtgtgtgtgtgtgtgtgtgtgtgtgtgtgcgcgcgcgcgcctgccatgtatgtatgggtgttcatgcatgcatttgcgcgctaccaagaacacatatggtcctggaagctgaaactattatacctttcagaagttgtgctgactcttagtaataatacaaactgaacatccttactttcagaattccaaatctgaagtgctccccagtgtctgtagtacaagcatgaaagaaagatgggacctggtgtcacaggtaatagtcacagtgtaggtgcaggaaaaatattgtgaaaaattacacaacttacaaaattacaggatatgggaataaagtatatataaaacacaaatgaactttatgtttaatatacggactcatccctaagatacctcattccatatgtactggctaattttgtgttaacttgacagaagctagagtctttttagtagaaggaaagtcaactgagaaaagtcccccatcagattggcctgtgagcaagactcttgtacgttttcttgattgatgattgctgtaggaatgctgaacccactgggtggtacctcccctgagcaagctaagggagcaagccaggaagctgtgttcctccgtgattgacttctgcatcagttcctgcttccaggttcctggaacacttgaatccctaatctgactttcctcagtgtgatggagtgtttgtcacctgaatgatgtaagatgaaataaaccaagcattttcgacgtgtattagactctgttcaaagtgttgtgctgttgtgcgtattatttaatgtcacaacagctcaactggaagactattaatgatggtcttccttatctagaggagatatgggctcgagagatgaacttgccaaggtcataccctcagtgacattatacacccgtcgtgccaggctgggctccagatctcgagttctaacactgctgtgctgcagctcacagctatgaatttttcttaccaatataaagacaaaagtgtgaccagctcctttacctgtaacataatacggttttcacatagcgtttaaatgaataactttaatgaggttgctattctgtgggatgtatgtgcttcaagaaagctaccatctcaacactgttgatctgcgcccaagtcaagcaagagaccgcacattcggagctactccattctcattgaagctcagcaaggagaagggtggggatttacttattttccacagtgcttcttccttttggacgaataccaagttagtatttcagaaatgctgctctgcagacagaacagtgacgtcatggaggcatcattcggcccgatgttactgtagcactaccaaaacattgatgaagtcttggcattcatctatttattgacactgtgaatatcctattgactgtcagggtgccctctagtctcttccactggatgaatttatggtaggaagctttccttaaaagatagcacctcagataacaagacttttctcagaagtttatgtcacttctaatccctcttatgttgatagtgtttataggcttctctatagatctgacttgtttgaactaaacaggtcgatgctgcctggacagagtcagtcagccagaggacccctgactgagtttggtaacatagcatgctttgcaggtcaaaataatacttagtttggtctgagataattttccaaactgtgttatttggtatattatgcggaagaatgggagctttggtactatggttgcaggcttcaatacatagatgcgtacatacatacatacatgcatgcatacatacatacctacatacatgttgatgtttggctttgaattcactagatacttccttattcttcatcatcagtatgctgtagaataaacaattaagaaaaatctgactctaaccaaattggtggtttctgacatccaaagattgatattcttggttttattaaagttttaaaattcttcgaatattttagagcatcccatatgaatgccagtttgctgaaataaatgggattacttgaattttttcaaatgccttttgggctttgtaaggatataggtgtgccatggactttgaagtgtattaatagatgttatttatttatgtcaggaagtagagcgagtataaggcccaggttttctttcttctgttcaatatgtaacagtctgtggacagaaatggggaaagtggagtaagattctatagattcaaaaggacctgttacaagatatctttgaaatcaggcttaggcaaagcaaaaaacaaaacaaaacaaaacaccctgagtaataccactggacagatggcatctgaagtgacacttgcctgagttataacccagaacagcactttgtcctctcctctctagggactgtttagaggtcctttttgacctaaccatctagcgttgtcaacataaccagcaagactgacagcctgttttgactgtctggatggcgctaactgtggccaacagtatctaaacccaacccaagccttaccagctctgtcaaacacagccaccgtgtgcctagccggcagcctgcatcctaccaggtaccattctccatgctccgaactagttctaggagtccattccgtctctaactctctccagcttctccctggaaagagaacagaatgaagaacatgtgtggcttggagactttcaggccatgtcaaggaaaagggcctggtcacttttccattcccccatctctgcttccaaacttggacacattgtgagaatgtcagccgtttcccaaaggcctctgtgattctcactgggttgtgtttcttctcttgagttgcaggcagatcccttatagcttcctggtcactggtctctgtagtttactatttgtgaattccactgtctcaggcttttttgctgtcctttctcaaccccatcatagcccgaccccgttttcttactctcctttacacatgcattgttggtggtgactttcacatttccttgcctggtttgttctcacctttggcactatcgtcatctgcctgtttgcatgcgggggtgccaaccccttgggagatatgctgagtgccagaatttcttcatgtaggatcaagagaaagtagttgacatgacttattttaattttatcattatttatttattatttaaattgttattattattatattgcttgataatttcatacatgaatataaagtatttagatcataatacagtctgttatttggtatataaactttggtagccagctcctattttctcttaacctccactctctacagtttcttcgttcttgcaccttacttagtcctgtgctgagggctatggtgacaggagaatcattggtctggagtcagtgacccaagttatagtcttgttattactactgtcctgagaagggtacttctgtctgctttctgtatccagtattctagtaggcattccatagtaagccttgattttgttgtcttgattttgtgcaaaagcctccttcgagcaggagatgctgttgttgtgacaggcttctctaggcctcctgctgctgcctagatcctggaaacccacatctccatgggttccctgtttgtgttgtgtcttctctgtcaagctgccagtgactgcttgcacagccttagtaataactgaaactccataacctgtttcagcaatgtagtgggacatatgggtacttgagtggtacttaaagaaccaaggaatgaagatttaaaatatagaaatgtcccaatgtgcagagctcactatgagagtggttattcctcatttggaagacttgatttaaaaacctgttatttattatatataaattatgcataaggagaataaattacaatgaaaataaaacagggccctagttatcaatggagaagacaccggtttcctgatgcaggttcattctgcagtgatcacatctccttcaattgtcttgttctctcactggtgagtgattcttgcattaaagttaccttcagggttaaaatgctgaataatggggactgactcatagaattactgattcttttggttcaggatagggcatttctgaaaaggacctagtaaattcttaaattactagctggggaaatctgcttcaaaattacttgtatattcactagtcttcccattcatgactgtgaaacacatgaggaaacttaattgtcttgagattttagaaggttcagtccattgtttttatgggccctatgatgtcatagaatctagagtgtcatagaatgtagaatttgcaagctgagcttctgagcatgcccatggatagttatcttgataacattaattaaaatcagggttccatcttaattgtgggtaggagcattccataggcaggggatccatggctgaataaaatagagaaaatgaactcacccttagcaacattcattcccctcagcctctttttttggggggtggggtgggtggggttggtttgttttgttgttgttgttgttgttgttgttgttgttgttgttttgtttgtttgttttttgtttttcaagatagggtttctctgtatagccctggctgtcctggaactcactttgtagaccaggctggcctcgaactcagaaatccgcctgcctctgcctcccgagtgctgggattaaaggcgtgcaccaccatgcccggcttcccctcagcctcttatcgggatgaccgggccagcttcttcaatctcatcctaccttgacctccgcaccaggatggaagacagttttgagtcagaatacactctttctctcttacgttgctcttgtcaaggcattttacggcagcaatagagaagtaactaagatgcttgggtagaacaccatggcaggagcacatgacagaggaggttcttcatctcatggttgcaaggagcaggagaaagatgaacagagagaagcccaaactaagatgtagctccctgactgcttggctcctactcttacaagtttcaggatctctcaaatagcatcacgggatcagagagtcagcatctctgagccagaatgtgggtactcaccaaacacctcacttgcttgtattttgggagatgcactcttttaggtgcatcacacctttcaaatgaatctgcacaggctcacacggcagatgtaaagtctaatccaggggaagacacctaagactctatttctaacaagtttccctggaaatattgctgccccttggccaggaatcatatgtctgtgtgtgtgtgtgtgtgtgtgtgtgtgtgtgtgtgtgtgtgagaaagagagagagagagagagagagagagagagagagagagagagagagagggagggagaagagagagagagagagagattgctgaggttatagttcagtggtaaagccctcacctcccatttatgaaaccataggctacacaccctctcccaaaaaattaaaaagaaacagatttctgttctccatcctctgagtctccatacctgcaaactgagtcaggaggttggacatgatcacttagatttaaataatttccaggttatcttgctgatattccagaaagaagggatggaaggagagggaaggagcaagaaggaggaaaggagagagggaggaaaaggaggggtgggggcttttaaggtctaacccaggctagcactcctggcatactttacctagcaggtctgtgctactgttgggtgtatttccttgggaagacttccacagtgcttgaagcagggacagaagaatgaagagaaattctgtgagtggtctcctcagatgaataaggcgatttgggctaatgtcgtagaaagagctggactgggatctaggacatggaaaaggaaagaggaagctaaaccacagccctggctgagctggagctctgtggatccctctgacctcgagcttgtagtgataaagcagtggttctcagcctatgtgtcatgaccctgggggggggggtcaaacaaccctttcacagggttgcctacgtaagaccatcagagaacacagacatttacattacaattggtaagagtatgaagtagcaacggaatagttttatggttgggggtcatcacagcatgaggacctacagcatcaggagggttgagaagcattgttctaaaggaaaattgttgctatagcaactgagtttcagttcatgtgggtttagtctagttttgttataattgtgtgtttctgcattatcttaatgaggaggggttccttttgtttgtgacagtgttttctagtgttctacagcaaggagacacataatgaggaaggcccagacatttgccaggagcaggatgcttgataactcggtgtctgcatgaagaaaatcaggtcaagaagtgctagaagccagacccagtgtccccaggcacctcttagctttccacatgcccagacaatcctacacaagactcctcaaggattttattttcctgagaagggatactggaaaaggtcaaatcaatctataaagtatagaaaggattatagagtaagagaacaaagtggttatcagtgctaatatgtgtagttagtatggtcaaggctttgtcttcaatattcagcacaaataaagtaaataaaactaaaatataaaagaagggtgagactttacggaagccacacctctctgtattcaggtgctgtttttcctgtcatggtgaagttacctggtacccctgctgcgtgtgcccaccgcaagcaactctgagaccccaccaaggcatgtctgttatccaatagctcaaagatacacctctaagggtgacatgctattaaagtattcaagcttacctacagcaattcaaacaggtgtatttttaagtcaccactttaaaacctgttaatctggaaataagcaaaggcctgtagctcatacctggagaaactttccagagaaattctgggactctactgacacctgctggcatctcatctccttaatgtttgaaaagagcaacaaaacacgtcaggcattaatatttcctgtagttactggcacgcatactatgtgtttggcctgagtcatggcatggacatggaggaggtctaaaggaccttgccttccctgacagagagacagggagcaagcgattgggtgaaaacatcccaacatggggacctgacccaagacgggctctgtgactctgggcaaggccctcagacctgctttcatcttcataaaaagaacacgtcacagcctcccactcagggctaagctatccctgaggatggtggtgacatttgcgatgcgtgagttctgtcatgagtggtgatatcaaaggtcatcacctttccattctgataaataagagtcttccccaattctattaaaaaagaagaagaggagtaggagggggaggagaagaagaagaagaaggaggaggaggaggaggaggaggaggaggcgaagaagaagaagaagaagaagaagaagaagaagaagaagaagaagaagaagaagaagaagaagaagaagaagaagaagatgatgatgatgaaggcagtttaagcctcctcaatacctccccctcccccagtatctggtggttatttctagaaacaactaaattagtgtgatcaaaaaacgttgtttctctgtaccggccacttctgtgccctaggaaactgtggactttgttctatgttttggaacagatctcaagccttcaggttgagaaaaatactcccagttaatgccatccaaattatttgtgctttttctgtctgctcctgggaaactgtgtgggcctgtggtttgttaggccagttacaggatattcaataatctccggggagccaagtccatatttagcccgacagaggaagagaggtctggtaatgagaaaagaagcaattctttaaagctcctgtttcgtttcttgattctctctctgtgtccagaccttacctgtttgttgaagcttttgatgctatttgcagttctcagaaaacggcctttgctagctgcaaaaggaaaggtgcctcctgagagttcttccgtcttccatcagaaagctgtcagcaacgtctgggactctccagggcaataaaagccattagcttcacacccaacagaacggcactagtgaggatgtagaagttagcaccctcatgcactgttgggagaaatgtaagatgatgtagctatcacagaaagcagtatggcattttctttaaaaagttgaaaggctcctcgtgtcgtcctgtgacccttgcctgtgggcatttatgccaagtaattcatatcagttatttacagtattcaagacaaagaagctcaggtatccatggagagaagaacggatggatgaccgtggcatgcacatacaattgaattctgccttgtaaaagcagaatttggcacattaaatgaaagcataatgccgagagaaatagccagtcagaacatggaaaatcctgtgtgattattcttgtgcgagatacttaacatcgtttaaaacatagacccaggaaactgactagcgagggtcagcgggagaggcacagatggggatgatgagtgcaaggtattgaggattagctaaagctcctgagacagaaccatttatgtcctgtgtgtctttaccgaaattaacaggagaagacatcaaataacaagacccaaaccacactgctataatgcagttatcagctcagggctttcagacatgaaatccctcatctggtaacgtgaagcctggtgttttggggcagtgctgtgcaccaggagcttctgtgatgacaacagtgcttctcctgggcactctcaggacagggcctcgagtcctcgtcatggctttttgtggggcacttgaatgtcaactgagacatccaattttagacttattcaatttgaatttaaggaatcctatgatcaacgacagtgacattcacatttatgtgactacccattccaaaatgtcttcctccccttggcagtagctgcaaacttaaggaggtagagtgggccggggaggagccttagctctgtttattcccaagctccagtttgctgcacagcatgtcgccaatgtgtcattcctttgtggcattcattagcatcagacattggatccaagagcagtgttggctttggttcatgggctagccttttctagaaaaatgcccttttacagacccaaagttctttcctgtcatgcgtaatctgtcctcacttttccttgtaaacccgtggagtggtggtatgaactgcagctgaggttcaggtccttatacagaagttctgtgaacacatccctgcttgctctgggtaccgtggcagcaggcaacgaatctttgactttttaaggctttgctggaaaagacaaacaggtaaactatgtaagcaggccagatggagcagcatcctgacactgcagtgaagggccttgtcacatttgtcctctaaactggaataggtaaacgtatcggcatgtacttgtacagcatgacttagagaaggctgaacaactaaaataataaggcttatattgaaacaggctgcaagtgggaagcttaggaagccagccagtctttcatggcattgtcatgccacatttaacttaatgggaaaaatgaaacctgcagaataaaatacaaccgtgtaaaatatagatgcctgtgcagcaaggggggataaaagaagagtctgtagttttattccacagaggagacaggctgtattatagtaataataataataataataataataataataataataatgaaaaagcctgtacctggctacagaggactgctcactgtggactttttctttctttttcttccttttccagcaatgggtagaaggcctgagatcgatcattcacaacttcagggcaaacaacgtcagtccgatgacatgcctcaagaaacagtgagttctgtttgtcttgccttttcttcaaaggagttatttagtaagctttctggctaggagggaagaactgtatcacatccatcaggccagtgtccacctttccttctgtacccctggctttggaagttgaccaactcccacctgtatttaaaccacttaaatacatagcaaggcatatgtgatattcttgtcatgagatctgtagcagacaaaaggttggtagcacaggtatcaagcattctttttgttgttgttgttgttttcttttcttttattgtctcctaaactccattttctgatggatagcttgcatgcctcacctgtaggataagttctagggcacctcaggtctccactgcatgaaactgacaatttagggatatagccaagagaagcatttggaaaagcatccattgcataagtaaaacagaaagtcctgcccccccccccccaagaatactgcttccttgaatgtgcggtcagggttctttgacatttctttcgaaatttcagtcaatggttcagtcaactcctgaaaatcttactgcaggtcactgttcctggagttccaagtggcttactacactgatagattgtcatcatgctcagatacattactgggtcaaataattagttttcatggagaaatcacagaaaagcagtggtctgtaattgtgcttggctgcaaaattgtctgtggcttcgtagtgacaacaaatggcacatagctatgaggtaccaagataagaatatgatgaagatgcaaataaccttgtggagataaacttccacgtctgaaaatgaggccctagcaccaagagagcgatccagtgattcttcaccctgctcagtgggccaacaggccagtccttaggcacttcctgagtagtcagcaggtacttaactatatgaactctaggttgtaaaccccagctttgccacattgggcaaatctttagccacttagtccccatttgtgaaccagattaccatatggatgaaatcagaaagcacctcacccagtgtctggcatcctcggtggaaggaagttatgaaggcttgtagattcctatttgctgtgcagcaacacttccttcctcagagtcattgcgttctctttctcagagataaccttgtgaatgttgcacactgtgactttgggtgctggtagcttcaagggatcctacttatacttgaatggccaatatgcagacaccagatctttgggcaatggagccactgtttacccacccacaggctgcttagcaggggtgcagacctgcttacttgtccagaggatgcgtctctactaaatcgaagcctccatgcctgggagattatactcctgttgccatgacaaattccaatagggtagcagagccagcccatgtgctaccaagggtggaatatattgtatgagggcatgtaaagaccacttgaaacacaagtttgcttaagccagctccctgcccattctgcctccttcgctccttttgtcccattgtgcttctggaacttaagatagaaactttcccaaagccatgataatttgtaagttgttagactgttagtgcctagaagtagtaggaataagactcattagctgagaacaatcttgattccagtgtgttctggagtgttctgaggcattgaagctcctcacgtcctgagaccctggggaaggcagagttacccaacattctgagaccctcactggggattgaaaatgaaggcgggcttccactcattctccatccaaaccttggaagccgggagtagtgaatcccctttggccttagcctaagctgcatttcttgccacctgagtgttttcagaagagcaaaaccaacacaaccatggacaggtgccatgttttgctcagtgcaaatatccaagttctaattcccctaatggtatcagattttaaaacataggcctctcggttaaatttgaatttcagctgtagctattttactgtaaatatgtagtaaatgttaccaggacacattaaaatagtaggttactcgtcttaaaatcaaatgttactgggcatattaaaatctgagggccctaaattcatcccgtaatgatggggctgttagaataggtgttctgtctgaagaagcttttctctggggttctcggtgatctggagcaggtgctggtggatctgctggtgggttctgaggctgtgttgctcttgttttccagctggatgaaactggcctttctgaccaacacaactggtaaaatcccagtgaggaggtaagtgagacacgtgattctctgtgtcaccttcaccgcatcaagccaaacagagccttccagaccaaaccaaatgcccaggctgccacactgaaccaaagatcctccctgccacaccaagtcaaaggcccacccggctatgacataatcacatatgatccttgccttcaagatatttccagaagtctagactctgctatttcgtaaaaatcacccatggaagtaaagttgtacctccctcagaataggatgcattgctgtggtaaagaatgtctgaaaaaaatgtctgaaaattgtagcactagattttcatcagtgaatcacctggctttcatgatttatattgtgtcttcccccctccagcccctttacctgagcaacaactacctccctcctttcgagctggaccccagtacactgatcttctggcaggtctatgcctctggccagcacttccccattcaaggttgctgcttatgcagtcccccgagaaggtggagctttccctaaattcagctgctgctgcaatatgctgcatagtgtttggctccttctcacactcaccaagagaagctggttgtgggtgcttacattgactgaacatgagagaagttcatttctcacagttggggaagctgagaatgcatgaacagagtgccgtcacgggccttacagactgcagactgctttcttccagttgtgccctcatgagaggttagagggctagagaaccgtctcaaggacatttttataatcctattcccaagagctccccacccctcaccataaaaccacctcccagaggcccctaataccagcacggtgaagttcagttagattccatatcagaggaatttcatccctcacctcctagcgttaacaatgacagagaacaaaaggcatatggaacccaaagggaagaaggcataagccagacggattcttcccatgtgctctttaatagtcctgacatggttcaccctgggaggagtcctcacacatcttctctgcttctcacttcctttcacagtttagggtttgctactggtctgtgtgtagctggaaggacttgtgagggtagctatgggaattcttgacgaaactctccagaatcatattgtttgatgtttgtgtatgcattcacagacatcaaagaagcttggctcagactcaggacatcatctgtccacatgaagccagacgttatgtgcccttaacctgaagcaaatgcagactccctgtataccaagcccctttgcccaggtttctcaactcaattccatgttgatgttgtctctggagatgaacttcagtaaagacacagacttgcaaaacaccaaaatatagaagagagctgtcctagactgacctacctttagcgcacaagacaaacaagtcacaagtgcagatcatttgaatgcatggatgccatttagccgaggcattcaggttactcctggccctttccaggtttcttatcctacttctctgctcacatactccattctacaccaagctactaatctgtgcccctgtgcaaatgtccccatacccccactcacattgtcacacaggacagaatcatcctagacaccatcattttggtccattccatagatcatggggatcctgaacctaagtacccaggtgacatgtctaggattcttattaatgagaaactggactacactgatggcatgaggatgaccctgtgcagtgtccctttttattcaacctttcatgattatcgaccaggttaaagatcgcaggcagttgttgtgacttttaaaaactccgcatgtagggttctttgctgcctcgttactgctcaagtgagcggaggttttcaataatatttttttctaacaagtcaggtttaagtatagtatagaagtttataaaaaaacaaaaacacccaaaaccctgtgtgtgtcctgactggtagtttttatgaaagacatttcagaaggatccttaactaattgaaaacctcccttcacttgagcaggagcaaggcaattatttcaatgtatccaaaccatccttgtcatagagacagtgtgtgcccagactcagagtacatttgttggtgtggggaacagagggtacatacggcagtgcagagggggaactctgtgcattatgcttcatttttttttccataagatttggaaagtggaccgagtgggatacaagattatgatccaagtgcttctagccagtagttctggtttcagtagcctgccttccacccaccgtgctatcatccctcagggttggaggcctgttgaggttctgtgggtccccatatagcatgttcacatacaaaatcattacaactgtgcttgaaatgctctagatattttgccattgacatgggttttgtgtgtgcgtgcatgccattattaataggtccttaacacaagacatctgtgacatggggcagcttgttagaattgctgtagtattgatgccaagccaacaaaaggggaataactctcccggtagatagtctgccaagagttaggtagaaattgttctgaatgttttaatggatgtgaagggtaaacacttttaaaaatgtcattttttcaccaacattttaggggtttaaaatggaaactattaatatagtgcacattgtgttaaaaggggatccagcttcatagtcattgcgtaacttgtgaaaggcttctgctcttaaacgttaaacctaaatataatacccaggaaattgcaggaatgattgatgaaggcagcctcactccttccctccctcttctctctttctttatctatatgatcttacacattccgcctttccctcaaattcaccagcttgctgcagttcatcctcccacttagaccattctctgaaagtaacttgtctgtctcacattccctgtaacatggagtactacctagagctagagagttgggtgatggagatctgaatggctttgagcagtaactggagaggctactaaagtggagaccaagagcctctgtataataatactggcaacctggtctgcatgacccatctatctattcaggtcctgaagctgcaggaccctacaaagggtggtaccctggtccttcactttaggagtctcctgtgactgtgtcagcagtcggtgttcaaaactctcagaaacattgaagaacagttatgggcaaaaagatgaactcccttgcattctagactcatattctctagtcgtttgcagggtagcgtgggatacagtatttagccagctctgtgataagactgagtacaacttcagtgtgcttgcttttgtacatttctttaagggaaggagtgacagtttgttttgaatgaataaaatctcattgagaaacttggagtgtagcttagttggtagagagattgcctagtgtatccaagtccttggtttccataaatccaggtttgattgtacacactcaaaaccccagaacagcaaggttgtagggttctaggctgtagaccctgtctcaaaaaacaaaaacaaaagtgaaacctcacttagcaccttgtaccttaaagcattaagcagatgcctttggccacagaattttatatatatatatatatatatatatatatatatatatatatatatataattatattattatattattatatagggcttgttatatatattattatatagggcttattatatatggttcttaacctttgtgttgcaaccctttagcaaacctccatctctaaaaaactttatattatgatttataactgtagcaaaattccagttatgaagtagcatcaaaaatgactttatggtgggggttcaccacagcatgaggaactgtattaaagggtcacatcattaggaaagttgaaaaccacttatatagaggttataataatgtcacagtccctttatcagcacactgctctcggaatgctggttaaagtgcaccgttgtggaaaccaaagaatgcatattccctctctagcctccatatcacagtagatgaatttttcagactcagtaatgatttggaaaggtgtctggagcaaaggaaacagacattactccagggaaatagtctgataaatgcccttgtggctattttccattctgaggttcttctctttttacgtacaatgagcaaatgtgccttgaggctgtgctgccgaaccctactcatgtctgagaagtcagcacctctctcccccatctccttgctccctgatcttcttgttcttcatcctgtttcttggcacacagcccagcgctcaccacacgccttccttccttgcctcacttcccatggtgccttggttctgatataggaggatggctcaggctccatacctgctgcctcgttcgtggccatggtgattagttttcatgttagaaccaggcctgtctaacccatcagccttgagtcattgctgtggagagtttttcctcctgatgacaggttcttaactttgctgtggcaccacatgtatttcctcattgcatcattttgtcaagaaagacacactgccatttgtccttacattgaaattgctaaatggcatctaccccaagtcagtgtttaaaagttgaactggactctaaagacttgagaaaatatagtcataacaccttctattctagaatcccattatccatgtacttagtctgactacacacctaggcgccgctgtcgggctcacttatccataagtagaaccgtctcaagaacacttgattatgcttcctggcatcttcatggactgactataaaacaataatggtttaaatggacgcatcataatgtgtttatgtaaatctccttcctccgggtctattttgataagctggatcctgcagctcaagtctgttttgctaagctgtatcctgcagctcctcacactcaccaagagaaactggctgttggtgcttacattgactgaacagaaatgctgaggcatatgtgaaggtagcgtgcgagatgctaaagctccattgaaaagccacacttcacaggtgaaagtcaccctagtcttcaagtcaagtctacccacccccatcggagttcagcctttcaataatcataggaactcacaaccagggcttctaaccagggagtgcataaagccacctgcgtagacaaagcaaggctgagagccatgtgcatgctgtctggataccaaatatcctctgatctctcccactcagtaattttcattctaagtatcttccacacatttatcatggggtgggggatgtctctctttcttttacataaggaagtttgaccattaaggcattacaaacttgactagcatccatgctccctatactacctagttaaaaagctattgagaaataccatgtcctaggaagtaccaagtttctgatgaagtaactaactgggtccttcccccatcacgtttacagtaaagtcccagacttttagctagctagcatggcagggtgtctcaagcgtgcttagatgaaaacagttaaaatatgtcttgtactgagtcactgtggaaccatgcaagccagaagacgagtcacaggcctagccaatctggcatctacagggctactactgttttccttaagtgtgggcctcactcacagacacctgtagaaccactgcaccaccagccacgtaactttttcttaagaacaccgtctcttaggattcgaatgtatcattacatttgtccaacacccacttggtcacaagcacataatgggacctcttatgttagaattgagtctcatcagtgacagagttgaccctggtaagcagagggaagcttgggaattgaaaagccccatcaaacacaaggtagctttattcttttccttcccctgaacccattgtatccctaaggtattttgtattgctgcgtcagagaaagcaagatgagcactaactcggtttgttttttctttctttctcttctgcgccagtatcactagaaccttcgcatcagggaaaacagaaaaggtgatctttcaagccctcaaggaactaggtcttcccagtggaaaggtattgactaacttaaacacatttctgaatctgttttcatggttggttgtctgtgcaggcatatgtgctaagccaggtgacggttaagctgacctcagtttgtcagtcacacggagggcagatcactttctttctttccgttcgtcaatcacttgagaagtgttttaaaatccagctagttcacttcaaactgatctttgtcaactttattaagctaagaaaaagaaaggacgggcagctgtcctctgtacagtttatggaacctgtttagaacacccagccgtgctgccttaccaagcagagcagcagcatgaattattgactaagaaattcagtttctccagaaagccttgcacaatttcgtgaaggattcctctccctcccacacatttatactcatgacacttcgtattcaagtcattaaaattagtttttacactgcaagcaagacttacgcctctgactctgtttaaaagtcttgtttgtaaattgcattgcagtgtgatgggtaaattattggttgttccagtacctttagaggatcccttgtgatcctctaaatattcacaaaataaatgtacttaaatattcggcctgattatcccatatcctctataggagcacttcctttccttcctcaaggagagatagaaaaatgtctgtgtacttggtcaatgaggggtttcccagagaaagctgtgctgcaggcaggtatcaccaagtgtcccatgtatcacccattccatggtgacaaccagggaagcctaacttcacatgctgtggttgtcctaaatgtccatctcaagtctcccaggagaaagatgtttgtttgttttttaaatgcctgtcgttcttttattctccacagaatgatgaaattgaacctgctgcatttacttatgaaaagttctatgaactgacacaaaagatttgtcctcggacagatatagaagatctttttaaaaaaatgtaagttctagttatgagaaagtgtcatatagtacttgttattttgtccctgtaaaatttgaaacattttttttgctgtaatgtttaaatatatgttgctagcgttaggcctagtcagggttacatttttcaccccttaatttattggcgtagaagcccattgtgagttttttagaaaacttgacatagattaattacagcacttggaacatccccctcccccacccctgcattggctttactaacgacctacaattttaacctgctcctttaggtattaacccagtatgtgaactaactagatttggttcggaatgctgttgagaagttcattcattccagttatttcaaatggatgacttacatgttgtttttggaggaatgtctcttgataatgctaaagaattgcatagagcagtcactttctgtgacctcgtgggaatgttatctttccgctatcattgtccttgagttcctcgcacccacccctcccccccctccactacagtctctgactactctaagaattcagggttagaaaaggagtttagaattatcaacaaatgtcaacatgtaaatcgtacctactgtacatcatattcaaaaacttactttttctaatacatttcttttcagcaatggagacaaaactgattatttaacggtagaccaattagtgagctttctaaacgaagtaagctttttcatacattaactccatcagtctgtgtgcagtggcttgcctcccccgtgtcctcactgcatgctggcctcacgcaccctttcctggctcggcttctgacctgctgatctttccatggtggcttgaccaggtgcaaaaatcagctcctgtctgtgcgtccatgtgcttcctccaggctggctttgcacacctcctgttggtctcacgctgtggttctgtgtgtacgtgtgaaatttgtgatgtatttattcagttgaatgtgtctgatattgcaagatggtttttaagatagtttgattctgttgatctcgtgaacagagaatggattgagtttgtgacactaaatttggattctccattgctaacttttctcatacctttgcatgacctggaaacctgtattttttttttttttgccttttaatagattgcatgtaagaaaaatacataggtttaaattgaatatttgacacttgagcccctagataaaactatagtgttaggccaactagattgcaggttaaaattttatgtattattttcaaaacaagctcagagctgaatttagaccacgattcatttagcaactaaaactggctagcagcgtttgcttaagaacaaggaagatatttcagaacaggtaaaggtcgaaactttcattattataactaaaacgagacttttcttctcatgtgcaaaaaatacattttcgcaaaacccacagaggctcttttttttttgtctgaaaaaagaaattcacctttcccctgaaacacataagtagttagaaaagtttaactatggagtagacagtacagtcttgtctggaaagcatttaagttctaactaggggatctaaagagaaaggtggtaggagaggttgagaggcctctcggtgtggtaggacatacatagcatacaagagttcaatccctagccaagagacagggaagttagcatcacgttagacaccacctagtgccttagaggaaagaatgggcagtccctgacttgccgccttacaggaacaaatgacatctttttcaaaggactcctcttcatgatttctgcaggctcacctgcttccagtgtatgaggctacacaccaggaactgttaccccgaacataaatgcactgagacaagaaacagagggggtccatatatgcacacagatgcctccaccccccaggggatccgttcagggcagtactgttttgattttactcaaagctgttttaagtctttccggttcactgcaccttgggcatcgaacgctgtgtttgtacacaatctttacccagatcttatccacatacttggcacatttctcactctctttccttaaccctctgcctcctccccttctttctctgttgcctgtttttcctttcaagtggggggaccagcaggaacccagcttccgaggaggtggaagatgctttgggacagaggagaaaactttaccatgccatcagttcatcatcccttcctaagccagccatcttcctagatagaagctcgtgctttctgactgtattttgcgttgtagtccaggaccagttctgaagtcccaaggacaggtgctgctcttgcaggctcctgcaggcttcatttcctctcacagatggttttcctttgtctgcctaataataaattttataatattgaaagaatttagtttttttatttgtaaaccctataagcttttatttttaattggacaatttaaaggaaacataccattctggctctgccatccatattcttcattatgaggcaggtctttccccatcactggtccagtggacagccatacctgtgttcttcatatttcctcccatgtagcttcagcaagcaaggagatactttgactgtgtggatgagactgatggaatggacatgtttctagatttctgcagattgtagtatatgccttttaagtttatgccgtgggatttcaatcatagcatcgtctccaaagacctctttcttctcccaacagcagtccctcgtccccaccccttgccagcttcttgcacattctatgtgcagttctacttttatcttgttaacgtctccagagtcaagacagcgtttggcagggcagattcacgtcttgtaacgcaaggacacagggctcatcaggaaatcaagagggagtggaacatgaaggtctgtgaccctaaaaaataattagacctcgacattttctaagtatctcagccttgtagccttagtaggcagtttcactgctgcctgggactcagcctcatgcagaaagacaagagtaagtgaggcccacctgaaaggaggccctggcctccatatacgcagaatttagagcagattgttatacctcgatgacagaaacagtcagcttggaaacccattcagtcaactagagaaccagttatagcaacagcaaaaatcaataggtgcagatacaacaaggtcaataggctagaattgactggggaaaaagaaatctccttcccattaaccagtgacacaatggctcctaccatcttgcagcctgaagtcttgttccttctttgtaaatttctgtttagtatactcatctcctaccttcaagagacaggagggagggaaagattcagtcctttacttggttgccgagtaccttatgtgccccctcctctgtcagtgatagctttggattcatttctcatctgctttccagggcctcttgctcatagaatgccgcagtctgattccccagacaggtatcattagcatctcctagtagtccactaacaatgcacacacactgagttggtagttgtcccttaacaaggtggtccaggtaatgtgtgcacatggaggtttatgcagcactgtctaagctaacaggattcttctttgaggtgcttatttgagtgggagagaagctgagcatcatgcatgcctacatacatgcatacatacatatacatacatacatacatacatacatacatacattacggtattccccataaagaatttagtcagccaagttcactactcacatctaaacttctcctatcactctgcctctgggttctgtacagtggccaaagggaatctttcttgcccacatcatgaactaacaggctggagtcaagaagagccagtggaagcacatgctgggagctgccagggttgggttctcctcgaagctcagttgtaattcccaggactagtcgccatctctgggatcagttggtttcatattcttttcccggttgctaatgagatacattgattttagtatcacctccatttctgtttcacttgtctcacagaacagctaagggcttgtagaacggagggctgtgtagagagcgtgaaacaagcaaaatgaggaagagggaatgggcctcctatggtgagagcaataaaaacaaagctttgttttcttacctctggttacctacgccctcacacacatcaccacatcatctgatcaccatagcactaaagctgatttttccattttccatttttatagttggaaataggtaagaaagcaccccaaatctctttctctttatgatatctttatttttttatgaaaagggagaagagagagaaagaggggagggtatttcattctatgagtgaaccaatccttgctgatttttattttcaccttttatataatttttgaaatgatatcatttatattgtatatcgttctattatatcatcatctatccttcccagtgcacttgtaataaggtcagttgacaccttttctcagtgaggctaaggacagaggtgtggagactgtccctaatagatctcatttacctgggcacagttttctgtgacctactcttaacagctatttagaacctcattttgcaaagcactgggtaccaggaagtgaaaatcctgggcatgttgtttatctgactggaagctgatgttatctcagagctgtgaagaacagggcctcactgtgcttgtttctaactagaactcctctgcatataatgttactctgaatatgatatgatatgatatgatacgatagatatgatatgatatatgatttgatgtaatatatgcagcattggtccttactctgatgcagtgatgaaaaccttaccatttgtttccctgcctctcagttattcagagggaccatgctatgttgccttttaaaatgtgaaaatttgggggaaagaaaagattctattatttggctgagcaggtcgaaatggagttttatttttgtctgcacttaaagctcttttgctaagactgtatccattaggtagcaaatactgatatgtgctgtgttccctggctatccagtctgctatatggatggtctaatgagtatgatgtcctctaatgacattttaatggataaagctttattaggtacacaggtcaaatgattagtcctaccttgcagaacttaagtatttgggatattttgttttagtttggtttgttttttgcttttgttgtcatggatatacaagtgtattaaaatgcatgtggttacaggttaaagcaatgctttttggttccgttctttctttccttttattttttgagacagggtctcatattggctgttctccaactcactacatagcataggatgcccttcaactcccgatcctcctgcctctgctttccaagtgctgcaattacagacaagtatcaccacagctgatcagtgcagtactggagattaagcccacagggctgggcaaacactctatccattgagacacacctcctatcttagagcagtgctgcttaaaatgaacaagataggatcacctggaaagcatactagccctcctctaccccaaataaggcctggtttcacccacgaatcagtgtcagtagatctgaggagaagcccccagaggctacattctttaaaatcacccacatgatcagaatgctgctggtgccaggcacagagaatattttaagtagcgccatgtttgtatgttcccctgtgtataaaacacccagatatgtctgaattcccttcctttttccccgttgccatatattttctctctcgtggctatattcccattttacctcccacatggatttgctccatcatttctcttaaggtccaaacgctcaacagtgattatgacctaattttcctaggaaagatagagaggatagctctgtgtgcaaccatgccggggtgtgaaagaaccctagccatcccttatcggtcttctttagtgctattgtttatgaggaaagaatgatttctagcgagtggttgaggttctatttctttgaatgtgtttaaatgattcttctcaccccagggtgggttcttatccccctgaatactggagcgtgccgcatggtgcagctccttcaagggtgcagcatgtcttcacttgcctggcagcctcctgatcacatcagtctctctttctctgcagaactcagcagcattctctccagaaccaaggcctgctgttgttagtataatagtttccaacatatacatagcttaatcaataattttttgttattacaaaagaagcatgcttcttcttgatagtctgtcaaaagatttcatccctttaacacccctaactaaacaggacaaggagacgtctagacacatctttgttttagcagttaagaccaagtgttccatgggctgaaggtgttgtcctgtacatagtcctcctttccgaacctgtaacagctgcttctaagtgtcttcctaataatattgcaaagtctgtgcatgcatctgggtaaagagttgttgccaaaatactatttgttgagcaattcttgctcatatctgctaattgtcattcttccacaaaagtttgtttttactcctttgagggataatcatggacacaatgcaatcctgtcattctctgaagtataaggaagtatagtggaccctctatttccagacatgtgccatgacatgtgagcatatgaacatacacacacacacacatacacacacaaacacaagcacacacacctgtgcaggcacatacatgcaagcacacacatacatgcacacacacatgcaggtacacacacctgtgcaggcacatacatgtaggtgcataccatgcacatgtgctcatacacacacacacacacatacacacacacacacacacacacttaaatagtgattgggtttctcacaattctaggaagttggggtgaaagaaatgtgttgctcctgtaacacaagaaacatcttgtgtgctggttaggaaaggttgctgtcagcagcttctgccagagccttcttccatacactgcacttggagtcctagagtaaagtgtgttcagctttagagtgaagatgttctgcaccattgctttttaatttcaaggtttttaaaaaatataatatacacttataagtgttatgtgcttattaattttcattattacaaccataattttttggaaaacactggactcaagaaaattaagtttgcagggtattcaagaacctctcattgttagcaaaagacagattaaaaactatttacttattctgtcattaagagattttgctaatactgttttggagttttgggcctctcagtgcatgatcttgttgcttattttaatttttttcactttttaaaattagatttaatactaaacttttacatattgtaaagattcgttgctctcatttttacacatatttgtagcaagtcacatccctataccacagccatgtgaatcgtagaagtagaagccagtgcagctgacattctctgtcatgtgtccctcagcatttaaacaggagaaaagcacacatctctttcttctctgccaggctccatcagagtaagttcagatatggactttctgaagactaggttagggagagagtcaggaaggcagctaagcctgatcttggtgattataaatacaatagtctagatgtaccttgttttacaaattatatgcttagaaatatgtttcaagtatgagggttatagatctaaatggacttattttgtcatcacagcatcagcgagatcctcggctgaatgaaattttattcccattttatgatgctaaaagagcaatgcagatcattgaaatgtatgagcctgatgaagagctgaagaaaaaaggtaacatcaatggaaaactttaattcaattttgtttttgttaagacagaaaaagtgcacaggctttaaaacccttgaattttaattaaaatatcttaaatgctttcgagcactgaagattcaaagatttgtaatttatttattcttttcctgctcttaaattaattcaatctgtatattttatcaagcgagtccacactgtctgaagtacactactactgaatatatcatgttgttaagcacagtccctgtacatgcttaaaaatcaagttttaattttgcatagtgtgcaaagacagtctctctgcagttttcgaaagaatttctgtcacataagaatctgcacctttcttttctcccttttgttttgctaagcttaataaatttagtacgtaatgtgaggtgctctagaattcctagaattgtgagcttgggttgcaagattaaaaacactgatagaaaattaactagtcaggaaacatgtccataagttgttcatatccctggacctttgtccctttcattttattttggaaacaatatgttgttcaaatattagtcaaaggaaaaatgtggagaagacttcgggtcatccctgcagcaggggcatgcatgcctgcgaccctggcatgtggaagtaggaagcaagcaccattgctcttgctttgagcagctttgtcttatcattgtgaccaggatacctgacaggagcaactcagtgggggaaaaggatttcatttggatcatattttgaggaaattttcatctgccatggcaggaaggcatggtgtcatggtgtgagacacctggtcacattatagcaggactaacaagcagaagcatccagatcccagagatgcccccagtgacctacctcagctagtctgttcagtaacctttgaaacagtgccacctactggcgatgaggtgtcccaacagatccacctgtgagggatatttcacattcaaactgtaacactgggaattcaaacatgagtaagcacccccctcccaaggcagttgtagtttgttcagagcaaagacaagtggaacagttccttggcagtgtgataatgttatgatttacgtatgtctttgttactgctcaagatctatcaagacctaaagtctaattataactggcaccacctaaaaacatagcttctccctttcacaagtgacagaaaattaaagcctgtcttaacttggtcagtgtaagaacacagcacaaaattctttcctcataggaggttaaatacatacattgggattgggacagtagctcataaaatagaaaacgtgcctctctgctagctcagcatttccacatgcaggtatgtaccctagagaatctctcatactcaattctagacctcagattcttcactgcctctgcttgaagaaggggtggtctgcaggccagtagcttttgttatcttctgtatacatgtgactttgagagtaaaccctccagtcctaacctctaccgtataccaaggcctttccatctgcacgttgtaaggggatgtttgcagcacgctttgatttccctgtacccagccttcttcctttcccagcctataaaatgccaccctgctcacttagctttccaagccagaaccccgtagttttgaattctttcacatcacgtatgatctttcaggaaaactcatgagatccacttctttgttctcagcttctcagatgctcaggcctacagtgcctctcatgggcaatgctaattgccttctgatttatcccctgaccccttatccagtactatacgtcacacagcagccagagtaagccttttagaacactatttgctggtatcattgaactcttccatcccaccaaagcttcccagcacacttggaataaaatctcaagtgcttaggaccaaaaactggtgaatgtggcctttggcttcctctccagcatcattgcccaccactttcctaagatgtcgctctctctaccctacattcattgaatagatcgagaacacacacttctgcatcaagatctccgcatttgctcattcttctgcctgaaatccctgctcctgcttgtgtggtttgtccccttactcatgtgtgtccttatgatctcactggacacatatccaaaccaggatcctagtattcttttgtagctttcatcttgcaggctttgtcccttcgatacttttaaggcattatttgctcatatatttattgctcttacccataatatgttagttttgtaaaactggaatatgtatctgttttctgcatctataccagtgtgtcaaaagtatttggtgttagaatgaacgaacactctcttatgcgatcagtggagctcttctgtaggtgtgaaactgttttcataacttgcaaatggtgacatgaagatacaaagggctgaggctgccagcgcttgtgaaacattggttattcgttctgtgcttgccatgtagccttgccccattttagaaaagagtgactgaagtgagaggtgccctgtatctcaggaatgtttctcaccagctctacaggttacctccagacagttgtgaaaattacgttgttgaattttggagaggcagccattcccaggaaaggtccctcctttgaatgaatgaaaattccagtgacttagaattaatgccacacatcctacaggtattctcaagttaccagtcctggaggtaggtgagctagcattctctctatttttcaggagaaaccaggagacaggcagcgaaaggcaggtggtcatagcagagccagaggctcccaggtccctcctcaccatggttcctagcacagtttcttcatttgcaggactggaaacatctgctgctactgatatgaaaggagaatatttatagactgccttggtttgcttgtaatatgtaatcgtgtattgtttaagttctgaaaggtacgggttcttgggaaggaccatgaagttgcttctgctcttatttttaagctgtcacaactaggctgagcaaaatgtaagatgtgcatcttcagacacccagtgtcattaagatctcctttcttcctaggcctcatatccagtgatggattctgcagatatctgatgtcagatgaaaatgcccctgtcttcttagatcgcttagaactttaccaggagatggaccacccgctggctcattacttcatcagttcctcccacaacacctatctcactggccggcaatttggaggaaagtcttcagtggaaatgtacagacaagttctcctggctggttgcaggtctggaaatcaagatggcaatttgctttgtttgtatatggcacctgtagatttatagttgtcctccccttatcccttggatccccagtgttccaagatggccagaggatctgcaaagcaatggctcatacctaattctatatatctacaccccatccctatatatcaataaatatgatgaagttctatttacaaattaggcacagagatagtttagcaacaccgatattaaaatttgcccaaggatatactgtgataatatcggcagcttcactgcctttcaccttggggctgctattatgaaaggaagggttccttgaacaagcactatagttctacaatattgtgaaacagggaaggccactactggctgacaggtggtagtgaatacagcgtgatgtgctgggccctgcacggatgctgttcataggcaagatgctcagcggcctgtgccaccccatgactcacttggtgtttacgttaaatgtagaagttgcttatttctagaactgtgcatccaatattctccaaccaatgttgaccgtagttaactgaacacaggtgagggaaggctcttttaatttacttttctcaaaagtcagaaatagtaatcatcatgaaaaggctctctacatttttctttaacagattatcttcatttaactttaagtgggaacaaacaatatcacacgaaggacccagttatcctaggagtcaaaagacactaatttactatgattttaaaatatgacctcaaaaatcttaaaaccagtaaagatagatattttaagaatccatattaagttgtatatacccatatttaatnnnnnnnnnnnnnnnnnnnnnnnnnnnnnnnnnnnnnnnnnnnnnnnnntggtggggtatttgcttagcctgtgcaggtctttaataaaatccctaccactgcccaaaaatacaaaaatcacatttatcaaaaaaaaaatgtgtcttctgattataaagctcggaagtttagttctctgaggggaggacactgaaagtgatttttatagcaataaacaaataattaaggttgaagtggtgaaaaaaaataagaaatataattgtatttttttggaaattttttttaaggcttgctatgttttgtgtctggaagtgatgcaagagagaataactccatccttacttcattgatgagctttgtcggaatacctgtgtgtgaaccctaaaacagcatgatcatttgtttcttgcttggctttaggcacggagatgggagccccaagcctgctaagcaagggcttgactgagttatggcccaggatttcgcttcactttttattttgagaaagaatctcacttacttgccctcgttggccttacaatctcaagacactggaattgtccattttctcccccaaggtcttttcagtgatgctaacccgggcattaaaatgtagttttgacctgcatacccatgagatacccatgttacacactcagctttctgacctgtaagatgccccttattttgatgcctcttggacttagtgtgtggtttcctgttacgggctcagtgttgtaatctgactgactgtgttcctaggtgtgttgaacttgactgttgggatggaaaaggtgaagatcaggaaccgataataactcacggaaaagcaatgtgtacagacatcctttttaaggtgggttttaagtgttcacaatcatagctttcccagacttttgaacaaatgcaggaaacaagaaaacaatttttttcattttcccaaacaatgtaccttcacatttctttttctctctttttaaggagaaagtcaagacaggtattattcgttgtataatattcccttcatggtcttgtttgcaaatgataactataatgcacagagatcctttagcagagtctacctagttctagcccaatacaattaatttttggcccagttgggtacatacagcctagctactcgagatgctgaagtagggagattgcttgagtttaggatttcaaggctagcatggaagacacaacgagaaatttcctcaaattaaaatcaacaaaacattttttatcttacctatctatttgcttgtccactttctgttattcctgagagactccaaggtagcataaaaagataaacaaagcttatacatagccttataataaggagacagtgaggttggcattgtgaatgattgttaggaaatattagaaatatggaaactttaccacaaaccaagctctacactttcaaaggatttagagccaagaagaaaacatgattcctaggaccagcagtaagcatggtcatttcagtaccaaggccagtgagaagttccccactgaagcttcccacctaaagttaaatagttaataaacaaggcatctcatgggatctttgggtggtgtctacatgtgatttgaaggctagtttcttagtgtgttcttccacatatccatagtattccaccaaagctaagaaaatgtgtggtaggctgatgtcagaaacatccatgcctgctggtttgcacagtctaggatagatggtgacgatgtctgaaacaatggccctgagctctggtgactactcaaatcaccaaggtgtctttcaaaccagagatgcctcaattctgtacatggaatgttccatccatatcatgtttcttagacaaggtatttgtgactttcagtcagcaacaattcaagatcatgatttctaaggagagttagggtgcattcaagtgagcaggtatgagttcatacagttatcaaatgacaaaaccagaaatgtcctcctacaagaactaaggagatcagtcaggacacagcatgggaaagaatcacccagaaggaaagcagactgcaagggcaaagccagagtttttctcaagtgaaaattctggaacatttactaggcaattaagtgtgtggtcatttttacctgtgaataaactttaagaaataacaattaaatgactgattcaataggatattttcaagtttgtcattttatccgccctgccatggataattattgtagaaacattttctgacttgctgaggagtgacgatgcttgccctgtggttagctacagaccagtaagaacttgtagatttatagtgtgagagtgtgattatagaagctttggttcgaagtccctttctctaaaataatcatgagggctaaccctcagattcatcttgtctatgtcataagatacaagttatggggaagtgtcagcccatttggaagtaggcagggatataaaagtgaagtcagagcccatgcctgttttacctcacatgtgacctgaatacagaggagacccacttttcactcggctcaccggaaacaatggatattgcagctgtcatagcagtacagtaggtcaacaaagaacggcgggcacagacataggccaagatgattccaaactcggaggaaggacagttagaagcttccagaaatccttgtgttactaccagcacatttctccagaagagtgagttgaagaatagactgtcatgaaaatgcctgtacaaagcttacgctcgcctcgaggagagtgatgcgggccaatggcgtggctttgtggttgagcacatccttcaaggctctgcattcaaagtgctacacaaaagggggcaagaggagccagagtccctggctctgcgcattgtcaagtgagaaccagcaggccactcaagtaatgtcacttaataaatagcactggagaaatagaagagagctttgactgaaaagcaatgtcctaaacctcttgagtccccccaggaggggtgtctaggcagacgtgttctccaggtcagaactgttaaagctgactttctgaaacgctcagttagtgggctgtgaacggtgtcaggtgccttaagtctgtctgctcttttctttcataaacactctttgtcgttaaaggatgtaatccaggccatcaaggaaacggcgtttgtcacatcagaataccctgtcattctctccttcgaaaaccactgcaggtataaaggctccttcttttccacgtccctccttggtggtgtttcagatccctcactcttcgtcctgctgttcattatttcttttaactaactgagtagtttgctgtccgatgtgctaagtcgcaagtcaccctccagtgaggacacagtcattcccaccctgtctaccaagaagtcatcttcatgtgactcagtaatgctttccctgaacaaaaggccagaaattaggggacacctagtctaaagttcctttgagatggaaaatttggcaataacttggaatgcatccttaggctttttttttttttaaatttaaagttgtaccaattaaagtctgtacactgtattacaagtatagctccagttaatgctataaagacagccctgcactttgtaaagcagaggagtctagttgtcagaatggatgtctctctttcttggagagctaatggacacttgagtttacaaatgccacttctttctccccagcaaatatcaacagtacaagatgtccaagtattgtgaagatctatttggggatctcctgttgaaacaagcacttgagtcgcatccagtacgtatttttagcaaaccagagttccagcatgaatggatttgttttgaaatgtgtttttcaggggtcaagtagcactggaggctgaatactaaggattttcatatttatttagattctctggtacaaaaagcttttatcgtgcttcagagggatgtagagaggaacacaaagtaaacatctgacttggtttaatccggctgctctcaggacctcgtgttttatgtttcataaagcttccaagccaagagtccaggcccctccgtgcgtcccagtgtccattgcattctgagtcacttcagatacccgtaaaagcacctgcactagggccccacctacaccggttcggttctgattgacccagggtcataagcaggtgcatgatttaagtcctccaggtgaacaaatgtgtgcccagggttcaacactcatgggagcccgtcgctgtgggaaaagctccagactgatgtcctaagacacagaggtcaagttcccaactccaaagtaaatactcaggcaaagtcacatgaccgtttttgaacttcattatatacctgccaggttgttcattaagcacttgttattaaagtccgtggtccataggagggctttatggagtctgaatgcatttgtaagcgttccagagaattccttggatttctgtcaggatccctaacatccaagaggatgagatgcactgtggcaaggtgttacgagaagcaaggcttgctaaaattaaagtgctctattaggctgttcagccttcctgtgactatggtagcattcgacaaaaggagaggggcaggaaagtccatgcatgacaagagggtgtttgctacgtgaatgacttggctgctctaaccgtggatttttcccaaaggtgtgtgtggcagcagaaagcgcatggaggccaggctgcatcctttgctctctgctgcctgctgaagcactggggcagctgcactccccgcactccctctttcctccacacttggcctgactgttggctgccagtgcctatggctctctgtggaatatgacctctagtcagtggtcaggctccgatcacatgagagacaggccggacggggtctgagaatgaactcccccacaaatcccctcactcggtgttcctaagggctatttctgagcacctgttctcttctgacccttgggatccccagctagattccctgtttgccaccctggggtgccccagtgataacatctgaattacatccttcactggccgtctcctcctttctcttgcttctccacctctctgttgacctgtgcaggaaccggcttaaacttgtgatgtgttagttcttgtctaggaagatgactctgagggattctgtccaaagaagcatccttgatttattttattgctgtggtttccttagccttctgttctcttgggtaagagaggagacttgatatttgcaaaggccattgtgtttgtcttaattaactaaataattaatgtgcatcccaaatgctgctcatcccccaggtccctccctcacagagtcccttcccttctcctctgagaaggtgggacccgctgggtaccccccaaccctggaagtctctgccagattagacacatcatctgccactgaggccagaccaggcagccatgaagactgaatgttctttggttggtggctcagactctgagagctcacagggggccaggtttgctgactctgtagggtttgcatccccttcagggccttcagtccttaaccccaactctcccataagtgtccctgacctttgtgtaatgcttggctgttggtatctgcatctctttcagctgggtaaagcctcccagaggacaattatgctagactcctgtctacaaggataacagagtgtcattaatagtgtcaggagctggttcttgcccataggatgggttttaagttgagccagttattggttggcctttcctttggtttctgctccatccttgcatttcttttagacaggacaaattttgggtcaaaagttttctggattagttggtgtccttatccctccactggggggtcctccaggcctcttcaggttccatatccccactgttaggcatctcagctaaggtcaccagcattgactactatcccaggtctctaggacttcctagacatcccatttccatttattctctggcctctctcctatctctcactacacctgatcctaaccacccatccctctctcccacccagttccctccgtccctctgcctcctatgactattttgtttccccttgtaagtgtgatttttttttttttgtgaagggacgtacacattcccagggaagggaccagtgccaccaggcagcctgcagcaggcagccgtcagttaaaagtcctaagaagtcaatgcatagacttgcttctgaaacatagggtaaagtaatgagttgtgagataaatggttgtgtggaaagatgcataggtaagagcgtgtggctaatagctgggtggatggggagtgaataggtagacagaggccagtcccactgatcacagaaaatgacctaaacagacttaacttcctgtaaagtacaaacatgacaccacagcgaagttcagattctagccattcaaaactctcccatgtttagagaacccataaaaatcccacgtcagtctggtgagaagagaggcttagtctgtgacctgctgcagacgcaggggcgatctgaggccattcaagtgctttatgatggacctgagatgtgaaaagcccaccatacagcaggactgccacccccagcccctctcaggtcagaccctactctactagggagcttggatccatctgtataccccagaagactgggggtgctccagctttacagcattgtttaaattaaagttgaattcagtgagctaatgagcattgggcagaagcagagctgtgcacactgccatctagtggatgctggctggtatgactcccggcccctggggctcttccgctccggaatcgagcatgaagtccctacctaactgagctctttctatatatctctagcttgaaccaggaaggcccttgccgtctcctaatgacctcaaaagaaaaatactcatcaagaataagaggctgaagcctgaagttgaaaagagtaagtcagttgcacatgtggcttttgagcagttcggctgtctagatgaaatctgatttagaacagatttgggaaaggaatggtggaatgcagatagtacatttatcttccagcgttattccactacattcccattaatccttagttcttacaactggtccattcagtggaaaccctccatgtgtttacgtgcaaaaaatacagaaggaaaaagggtttgtactgctacatacattgccacggttttgttcataaaagataaattaatttacgctcacattggaaacatctcagtgttgtaaggccggggaagcggctccagggttaaacgctcaccgtgcatgcgtgaggatctgagtctgatcaacgagaatccacacgcttaacctgaacacccgtgatgcccctaaagacggaaggggaagacagagagtttctcacacttcctaagcgatctagcatctgttctcatctccgtgtgtgatgatacttacagaacagcttgaagctttgaaaagcatgatggaagctggagagtcagccgccccagctagcatcttggaagacgacaatgaagaggaaatagaaagtggtgagttgtggggccggggaagaaggctgcatgggtaaaatgctcgccgtgcaggcgtgcagattataatctgaatacccagaatccacatgcttaacacgaacacctgcaatgcccgtgaagatgggaggaggagatagaagaatttctttaagtccatgagccagctagtttggcaaaagcactagaaaccaccatgagagccagcctcaaaacaagatgggaggtgatgcctgacaaccaaggttgtcctctgatctccatgtgtgcactgtggacatatactcactgtctttcacatactctcattggcacacataaacgtatgccacagacatcacacacacacacacacacacacacacacacacacacacactcactcactccccgcacacacactcatacacacacacacacacacacactcctgcacagacacgtacacacactcacactccccgcacacacactcatacacacacacattcctgaacacatacacactcctacacacacacacacacacacacacacacatacacacttctgcacacacaaagagttatgagatgtcattttaaggtacaagtttttaaaagggttatattggaaataagaaaaacattaatctctcttaacaaactcctttgactagcaatgactttatcttgctaaatatttaggagtacttcatcttttgagggaatggcatttttatagatactgttatttccattttatctgagcactggatgttagtggcttagctgtctcccttcccattgtgaactgagcccttcagaaaagatttccagtcagagactcggcctttaatcacttgctgtattaggcaggagttgaagagaatttttgaaaggtccactctataatcctttatgttttgtaaagaaaaacatgaatgtcagttttgttactgatagtaataagacatgtgataagagaagcgagtgaagtgattgactgatgctcataaagtgaacttgagagtcaaagcctatattgcaattttgttaagcctgggtgtagctcagtgatatagcacaggtttaacctgcatgaggccttctcaaccagggtccctggaagccttactgaaaatatgaatattgaccatcacctatttagcctctcaatatagccagccatgatgtgctgtttaaaattggtgctggggttgtaacgcgatagcatatttgcctagtctgagcaaagccctcggttcggttctctgcactgaaaaataataatatactacttagtaataatagtcacaagtgggccatttgaaagtttggggatgttttcagatcgtgatctcctggccatgtatcctgagaattacctggccaggtgattggaacttgcattgctttatggaaccatggtgcacagactgacttaagactaattacttgtagaaattttcttattactcacacatatggactatgtctgattttagactaggtacataggtgaaacccaaaagctatgagagttacctaattttactcactgtctcttattgaagaccctcactgtgggagagattccattaagaaacaagccaagtttccatagggtttaacttcaatctcagagaaaaaaccatagcgtttggcttccttgtgtttctctgtgcctagtgggatctaaatgaccaaagatctctggtattattcagttagttcctataatgtttgtgccttattacataatgcaccatccacatttggaggcagaaatctgtggtgatttataattacctctcaggattttgtgagcaactggggtttatttggctagttcttgagtttttttttaatacagttgctagcaggtggacatctggagtcggcatctttttaagatttgtagacaatttagacaagattgctctctagtttaaccatctgtggagctcagctgggtcattgtagcagagcatcccctgtggcctctgtgtaatttcagcatctcacaacatttgctaagttataccatccaagaacccgggccctagatgcaggaagtaggagctgttacgttatttaagaactatgaacacttcatctctattttgttcatcgacgcagtgagtggcagatcagatatcagttcagctatctttggatgtataatatgtaaccattagatttttcagatttaaaaaaaatacaaaatatttaagaataatatatatatatatatatatatatatatatatattaagaaaataagcgctctcattctccagtgcccctgaagcttaaagatatccggtagtttgtacacaatcccttagttataagacagtgtgaggcatccggcatttagtagcaaagttaaatataactgtgagtgctctatggacttgtgtgtgctcaggaaatgctaacatatattcagatactctgtataagtcctagttactaagtatctaccaggaatatacggtttacgcctaaataatcaggttagactacttatgcaggtacccattatccaaaatacttggccggagaagtagttctgatctcaagatttttctacatttaatttttttaatttcataatctgtggcccaccctgctgagccctggaaaaccaggcttctgggtgactgctcttacccccaagctcacattttctgattcctagctatttcatagattaccaattgagtatccctaatacaaaaatgtgatatccaaaataccgtgaaatctgaaactccttgtttgttaccacaatgatcacacagcttaggattttggaacactctggttttttgactttcaaattcaagataatcaactgtgtatgaaacagacactgtagaggtggtgcgtggtctcccggtcctggttatgtgcgtaggtcatatgaaccttctctcgagttctcttaaggttatgggcagggtcttatttagcctcatgaattttctttctatctgttaagcagctgatcaagaggaagaagcccaccctgaatacaaatttggaaatgaactttctgccgatgactacagtcacaaggaagcggttgcaaacagcgtcaagaaggtctgaggcattgtattcccattcttaaatggtttttaaggggtggcagttattgtgggaaatttggggctgtgacaacaagagaaccaggtattgtgtttttctcttaattatataggacaaaattctctgctgtgggaccagaatttgacactctcacaatattaagtttcagaggacctataaattactcattaattgtaccctctaagggtcactacccaattgggcaggtacttttaaatatcaccgtttatagtagtagagctgacaaggagagacgcagtatcgcagggccaaaggttaccctgctggcatcattaggaaactgccttctggatgtgtcaggtgaagcctcggtacagagctggtccagctggcaagaaaagcatccgcctagcaaaaggatgaaaaagtccagccattcagccaaggaaagttgtcattgggttcctagaacttgtcaggcccagcttaggatgcactttcattttgccttttgttagcttctacgggtctcctacagttcaggagaacagatgggaaacacggagtaaaagagtcaaggaagcctataattcaattgtggctcgaactattatgacaataaaaatgagtgctaaagtggagaccaggagagaacagggcgactggaataaggaagagagggactcactatgcagagaaacagagaataacatttcataccacaggaccgcagtaagagcagagatggcgtgagtggagcagatgggatgattgaagggtgaagcaaggtgatatgtgtcaggtggaaatgaggtaattgagaagtttctatgagaaattaaaaatgagggtgtaacatgacctgtttcacataaaactaagtggggagagggtatcatagaagactgtggcgggccctttgtggcctctcacctagaggaaagtaaaggcaaaagtgtggaaaacagtgagagtgggcttttaactggtcagaagcagccctggtggttagagagtaaagagggaggagatagaagagtccaaggcatagcaagggcacaggcaatggtacagtttcccgatgatggactgaacttcgtgaaggtaaggagaaacaaggtaacctcctggaatccttgttggaggagcagggtaggcagtggtactgttgactggggtgggaaacaatgagaaaggactctgaagtttccagtgagacaggcaactggagaggtctgtaagctgttccagtggacgttccgaggagggacattgatccctgacctcttgttctatctaaccttgggtaagttatttaacctctccccgattttgcttccccatcttgaaaacgaaggtcataatgtctgtttcatcaggttctcatcacagagcaaaagagcttacatcggcgccgtccacacggcagccgctgtatagtagcaggtctgctatgctctcattactttcatcctcattatcacggtcgtcagcactcatacaacagcactggtgtgtagaaaggaggttgagcaagagcagtgagttcgagagataatgtttgaagtcgtgggaattgcttagatgactcacgagaggtagaaaagaaggcccgtgtggagccctaatccatagagggctcacgggagaggagccaggaggaaagagcaaaggctttgccagcagccacaccgaagagaacaggacagttaggggctttggataagaagacctgtgtccactaggttagtagcatggaggtcagtgggatagggaagttttgggagagcacttggaggaaaggaagtggcgggacagacaggcagagaggatgaggaattgtttccgtcttgaactggaagaatcaagtgcgctgatatccgagatgtgagatgtggaacggatgctcttttcaacctggctgatgtctcctgctctggaaagaaagccactggtgtggtgagactagacgagatcatagcaatgtcagggtgtggtcgttagtgaagtagggacgcctgctttgtgaggatgatggacagagatgcaggtacaaaggtttgatggcagaaggataggagattatttgtctgggagaaaagtcaaagaaatgttatcatttctgatgacagggaatcctgagtgccatgagagagcagatgcccactaagactcaggatgctgctgtgctccacaaagtactcagcagtactgtctcaggcggggctggcatgacagaaatagcagacttgctggttcagataccaaaaatgtatttcctgatgatctctgggatggatgtcaaggtcaaggtgccagtcaatatgttccagaaatctcttttagcaggtacattgtcccatagtggaaagaaaatgggaaagtaagatttttcttatttcttcttctaagaggactaacctcaccatgaggattcacctatgacctgattacttcctgcaagccccttctccaagtttggataagccttgccttacaatgtgattatgataaatccactctaaacattgaaaatgtaggttaaaaatgcacctaacacacttaaattgaacagtatagcttagcaacatagcatcctctagaactttggtcatttaccctcaggcttaggtggctgacaaggagccactgtcctgcatcacaagaggactccaaagtgtatctgtagccataaaaagagcaacctgacagtatcgagtgagtttccactgaatgaataccactcataccctcataaagaaagcaatcataaacaagccatcattatattggggaccatcagtccatcacactgaagtcagggttcaccacatgcttttggttgggatgcaaacaccgagtcacaaacatgaatgttggcttaccgacgaccgtttgcactccattttacatttaagggaagctggccacattgacaaccattttcaaccttcatgctttaatccttagtgaaatgtttacagtgaaacaactaagactgtcaacaagggagggaaatagcatcaagatgaggattgataaaagtataaaaccatgaatttttagaatacctgcgacatatgctttcgatgacggcttcatgtcatcaataatttacctaccattataagaaataaatagagtaagaagtttacatatgcttatttacccaaggacagacgaatgagtttggaaatttgccctttagagaggtaaacaaaataattctctttctctaatttagacctcagatgaccttgaacatgaaaacaacaaaaaggtaacaaaacaatcctcaagcattttctccatcaggaatcacccgcatgtggacttctcacattaaccttgatggtcttcctggcccttgcagtgccagggtcactgttcatagtattcacatgcctgattcacctagttgctgtacaaccattaaagccgatttaagacataaccaaggcaggcgagacagtttccctagaagtaagtattcaatgtactacactatctccttaaatggaatgagagttccgtcaaaggagaaggttacataattattagcatattgaatgtgaagataaaaataaccagtaggtaatcggagccatatgatagtgtggtggaatcgatcgtggttctgaaggtgccaatcctctgaaggttaccattcatcatagggttctcagaattcagtcgcattgggcactggccttactgtgaagaaaatatattacattttgttttcttttatgctccacaaggttctcgttgtttgtacacgtatttcattgtgcaatgccgagaccaatggcagtcacgcacagaatttgccaattccccggattgtcactcacaattcagaacagagaacatcctgccttgctgtctgtagggtcttgttgcatatagaatgaagtgtcatcttatttcctgactattcatcctgaagggataccctcccgtgttcacaaggaccctctatgcccggattgattttcttaagatggtagggtcagaagtacacagactggctaattcgatgttttccatgttagctggatgattttagtccccaaggcctcagttttgccctgcggctactgggagttctcatgatacacgggggtacattccaaaatccttcaagttcagtaagatgaggagatttcagtctaagtgcaacaggaccccgcagacagcacggcgggcataccctcatggctccaacatacagcactggtgttctgagcatgagacacatgggacaaaacagatttggctcttgcccatatttggcatggtgagtggactctgggcttatatggaaaaagatgaaaatgggcataagtgtcatgtactctatcacagactttcacaggaagaagcaggctgatgtcaaagatgcagaggttaggtcctcagccaaagcgagcagataagctaactgaccttactcactgtgcacccgagctgtttctgttcttagattgagtctcttggaggaaaataactccaaagttcccaacaaaataccgaccacttttcgggacacccattttgttgatgaatgagttatttttgctttaatttctcaagaaatgcaaacagtcgtttgtagtttttctctgtacaatgtaatatgtcctatgtagcaagttaccaagttcttttgatagtaagtgcattaatagagataactaaatcatatgtgtgtgtgtgctgcaagttcctgaagagattactttaaaacgtggtctccagttccccattggcagtgcctgaaaactcggctgtggaatgacaaccctttaggcctcctccagcagatctcttccagcggggcctgcagtttctgcctacaaagcctgtgggtgattttgatgtatgccattgctggatggccacccagtggagctttgtgtattggcctgaatggtaatactgcagtctatcactgtcggtgttgggtgagacctggtaaagtttcttgaacgtttgatggtcctttgaaaacctaacagataaaatgaatgctttcaggttatctccttttgtattaaaacctatgacttttaaagtaaaactttaagagagcaacaaggtctgttacatattaatttacgcaatgcagatactcttttaattaggatgcctaaactgaatccgtgagtccctttgaagccatccacttaaacgggtttgtccttgtgcttgcagggcctggtcaccgtagaggatgagcaagcatggatggcatcttataaatacgtaggtgctaccacgaacatccatccgtacttgtccacgatgatcaactatgcccagcccgtgaagtttcaaggtttccacgtggctgaaggtaacattgcaggttaaatgcagtagctttcctgtctgcttccctgtcgcactggctgccccgctgatttgttgccatcttttttctttgtggatgtccatcacttcacctgacttgattcacttgtggtggtattatgctgtcattctccaaatcatccacgaggtggcggtgcaagactgtgacttagcttgtagctttccgtatgctttcgtaaggcttctttatttactttgttatgacaaactatattagtaatatttatgaggcacagtacctgtctttgttacctgtgtgtgtatattgtgtaatctatggcttcaggagagtgaggaaaacttaatcagtgggtacaaatgccttgagttagggaagtaagatttgatgttctgtggtacataactcctattcaaaagttggttccccacgaaagcccgttcaaaagtagttaaaggtatttcctaaccatttctggcccgaagagtacgttattatcaaaaactgcatatcgcagcagtgactatgacacttgggttgcatatcacttgtttagtgagtccacatttaattcatcatatgcacagaaagttagtgaaactcagagcaaatgacacacacagtcatgtagcatgggccacgaattcttcctgagctgggatgtaagatgctggttgtgattctgtctgctgcttgctttttgaggggtttgatggctgagtttctgagtacatctttgcttgtcttttacagagcgcaatattcactataacatgtcttcttttaacgagtcggttggccttggctacttgaagacgcacgcgattgagtttgtaaagtatcctaacggactgtatgggatgaatggtgctctcaaggaccggcagggatctctgcagtagattggcagtggtctataattttaatatttagctttttgtataatttttatcatagcgctgtaaaatggtgtccccagacgtacatgcgttgtttccagaatgcacaccgcagctgtgatttcctctgagcagtgtttataaggggattggccccgtgctatctacctgcttgccattgtcccgcaccccactgttgttgttctctgttgtgcgttcgccttggctgctcttggatttccttaatcagttacccagttacaataagcgacaaatgagccgcatttaccccaagggaggccgagttgattccagtaattacatgcctcagattttctggaacgctggttgccagatggtttcactgaactatcaaaccccaggtaggcgctaatgtccagtgaccccgaattccacaagaacattgggacagggcagccattgcagctgctcccgttggcctgaggcattttctttttaaaggaagctgccatgtgaaaaaaatttgtttttcttgcatttatattaatggcaaaaaattaaatccccaaaacgaagccataacagaagatgccatttcagttttaatccattccatcaatgctatgagtagcccctattctataatatttttaatttctctctcttctgtatcaagcttacatctttgttcccagagatgggatttggtttcagtatctttgtgtgataacttagtctctttgctcctttggaaaataccacaaccaaggtggccatccagcaaacacggatggcagcagcacctaccataatatgacagactttcatcgtaaactctgtaagatgccatgcaaagagatgtcatcagagtactaatctgtagttcaatcttccagaatatattcacgggcagggtttcaacatacagtggtgcttttttttcccctacaaattctaacttttgataaatgtacaaatgcttgaagttttccaagtttgcatcagagcctctgaccataatcctgtgactacagattgggaaataggaaaataagcattaaaaaaaagagagagacagatggcacaaaccatatttattttacatgaccgtgttcttctgcatggctttaaaatttggtagaaacaggaataaaagtaaaatagctaactaaatagcaacgcatgtctggtcagtccctcactttgtgagcagcacccttgccaggactttgcaggcatggagccgttttcttttctggtcactctaacctgaggaccactgtccttgctccggactcaccacctccttttggtgggaatatgagctggctgtatttttcacgcctgggggagccttcctgagggccagagctccttaccaatggatcactgcgtggaatcctagccatcctttctagaagagtcttttccaggtcttgaaagaatctcgagtgtttttagtagggacaggacaacacgatggcagtgctttacttaccaaggactcaagcggccctccaggaggccagcgagtccgtgataaaggacagcgtgatcctaaagcagttcattgtctgggcaaacgtgtgcttcattctgaagaatggaaagaaaaatatccacttaatttagttactgctcctcttcctgctcctcctcctcctccccctcctcctcctcctcttcctcctcctctcctcctcttcctcctcctctccctcttcctcttcctcctcctcctcctctccctccttgtccttctcttatttataagaagaaagagaaacctttctctgcttacaaagaaaatttataaatcaggtcttcccattcccagggtagccctatgagagttccaacactcacacaggggctgagggagggtaagcagcaacattttatgattcttatccattttataatgttccttttaatcaagttctgtgttcttaatagccctgttgtgtgtctccagcatccctgtcccatgtggcattgagacaacgcatacccctaactatagctggtgtctatatccccaactactacgtctctactctgaatatcgagttaagcatcgtatgacttgtataccaaatgccgcttagtaagccagttctagggtaatctctatgaaaatgtacctggtatttaatttaaactaaatatatgaggtcatttcggcatggaaaagagtcatggcccctaaactaggccaatagaatgcgatggtttaatggagagagctttggaccttggaataatatggctttcattgtttccagtcaccctgtcaggatcttctctgtccagggagatgagatgttaaattactttgtcttttgacagatttagcgatgcaattgaatcaaggaaaatttgagtataatggatcatgcgggtgagtgatatttaaattattgtctcctcatctcagactctatacctcagctttaatgaaaccatgtcattttcaattacggacagctgaatgtatgctggttctgaagtgtgggtaaaaataaatgaagtccatagttagattacatttacaaatattcgaccttttctctgtcccactttgttaaactggttctttccttttaaccacaaactctgcagttcctcacatatattctagaatttgatcacttcattcgaaattcaatagtggaggttcttgtgtcagagacaggcaatgggccgtgctcatctgggcttcagccagagatttaggcatcaaatatgtatagccttattgctgatgaatacagaaatgaagtaaatttcatttcaaatgaagctgtgggtgtaaagttgaatttaattcagccaggaataaactttcatcctctcttgaatcttttgcatgtttataaataggagttatataatgctgtgaatgttgttctattttacttaaataacacttaaaaaatctgtgaaccaagtagcaaaataggaaatgttaattcttctgaaataccgagaagttgaataaaagtccggaacttgaattccgtaagcaccaaaaactcagctgagaccacagcccagtggctcccacatggatgcgtaggaattctctgttggccagtggtaatgctgtctaggagttctgtgtggtggcttgcctagtgagctaccttaatctccatcatggaaaataaggtgaggtaacaggttttcaaacaactctaatatctgaacactctctacctgtgcacatctgttagttatctgccagagtgcctgtacatagcaaaactccttccgtctgagtctctctcacccatacccgtggagtaagcactacattgccctgtgctgtggactgtgaagggcactcaagttatatagaaaggaggaaaagacccacagctaagttaacaagtagtctttctacaaggaaaagaggcagacatttggccaaatgtcaaaggactcaggaactaaacctttggtaaaaggagacagcttgtcagcataccactctcttccccttgttcaagcaaagaggtggtctgttgtttaatagcacagcacaccctgagcagcctaggttggttgatgatgctcttcaggaccgttagaaccttctacctgtaagtgtagctcctgagttatggaagagagaaaggaagtagcttgtatttaatagtcattgcacaagccgtcagtagaataaaccccctgtgtttctgtcctgccaggtaccttctcaagccagatttcatgaggcggcctgatcggacatttgaccccttctctgaaacccctgtggacggggttattgcagccacgtgctcagtgcaggtatgcccctgctcaccacagactattttatcatacagacgtatacaaatgcacctagaagaagacatgtttaacatcacggtgtaagaattgtaagttgctctcaacttggacccaatgtatgctgtcttctgagtttttgttactaaaactatgaggtgctttaagtaaagtacacagtctagaaagtatctcccatctgatgacattcacatgaagttctgagaaatgtaagctatgctaacagggagcaaattagcacctgtgcctggacacagatggaagggtcacagagaagcttcgggggcactaggaaggcttgctgtcttcactgtggtgatagttctaaagacacactcacatgtccataaaattgatcttactgtataactaactgcatatagtttagtatatatcacttatacttcaaaaaaattgctgttttaaatgagataatatgagaaccaaataaatgaacagcatagttgtttggaaggtaaatgtgaaataagttactccctagctttataaaagataaaactcaacactgacatttacaattaaacaactccctcaccgctaaccagggttaatgtcataaagaaagtaggccaagtctagcactggttgtcttttgctgtgtttctttgcaagaattcaggggttaatatgcagcctgatagaatccaagaactagaagagatctcaggacatagcccatagccgcagccctggcttcattccacaggtccggacagctccgtgacgtgtggagggcgtgatgtcttcataatatacttcacctgtatatttccttgctgtttttttccagccgtattcagaggagagtacatttataacctctgcctaggaattttgctttcaaagagtagttactcaaaaactgttttgttctaatatagaaaattccaggaaaaagatcaaataattgtattgattggaaattccccaacgaaagttttcatcacacgccttgccaccaatacaatgaggccactgtcccccctaccctgtgtctgtgtaactgcaggttatatcagggcagttcctctcagataagaagatcgggacatacgtggaagtcgatatgtacgggctgcccaccgacaccatacggaaagagttccgaacccgcatggttatgaacaatggactcaacccagtgtataatgaagaatcgtttgtgtttcgaaaggtaagacattagcagggtgtcactgttacccagtaggaagactcattttctacatgaagcccacaggatagaggaatgccactcaccacactgactcggctccttcccttcgtctactaagtgacctcggtcactgccgaatgattgtgtgcaaagagtcggctgttctggctctgccccttccttggccacctctagtcacatagaacacacttccaggttctagtctatttcagacgtgttcttacttgtggctgctatcatgcactgaagggtctcattctgtgctcacagctcaaaggttagatgaaaggctgcaccaacgctaaggtcagtgctgtgaccctggtgggccctgtgatcagaagtgaggcaccgctgctcacttcaccgctgctcagagttttgagtttcttccagttctgtatgccaggtccagggagcaagcagacgtcctctctcgtgtgcagtctttaatctctttggttgaagatgctttgaaaactcagcgagcaggcagaggcctgtcatttcctttgtcttctgtactgtcagacaaaaactgttttcttgcttttttggacgcagatttttccaggtggttctgctccatccatttgtcatggaacaaagagaaggggctcctgatctttcctaacaaaatagagactatttatttcagaacagaacaactggctgagagagaaagcaaagcaggctgatgggctacagatcagaaacgacatatgccatgtgtctgtctgtcaggtgctgagctgtctcatttgatacgattatcaccaggtccatcatttctcacaggccatgtagttttttcttttctctgagaaaaagtctctggtatacatataccacattttctttctctgcttctctgcatttggacacataggttggtttgtaacttagctctgatgtttagtgcctgcagtgaacacagatgtgcaagtacctccctggtatatgcacttagaaacgtttgggtaaatgccatgcagcatgtccaggtcacgtgacacatctagtcttagtttcttgaggaaccttcataccaatttcagtagtggctgaactatacattcccaccagcactttatatgatttctcttttgtccacatctttgtcagtattttttgccatttgttttcttaaggatagccattctgagtggggtgagatcgaacctcaatattgattcatttgcatctttctgatgacttctgaagttcaatatatttttcatatgcttatttgccatttgcatcactctttttaaaattaattttaccttatgcatatggtgttttgcttgcatgaatatcaatgtaccatttacaagactgatgtccttggaggccgggatagggtgtgggattccctggacctggcgttacagatggttgtaagctgccatgtgggtgcaaagactttaacctgggtcctctggaagagcaatgagtgctcttcactgctccgccagctcccatttctctgtcacactttgagaactgctcatgtcactgggcactgtattgaccagagtgtttgatgccttgctgattaggttttccttctttgtatattctagatgtccttcccccaactcatttatagtagctaacaatgattttctcccactctgaatgttatttactggttcccttggagttgaaaagcattttaatttcatgagtctctgttgtcacattgttggcattatttcctgagcaagtggaactctatttgaaaagtccttgcctgagtcagtatccggaagttttcctccaatattttcagagttgcagatcttatatgaagtgttttggttcatttggaatagatttttgttcaaagatagggctatagttttattctttcccagagttatttgctaatggaactatcttagctccaataatacctgtgacatctgtgttagaaacctgtgctatagctatatggaattttatatgaatcctcagctctgtctgctgatctacatgtgtaattttgggccagtgccatgctgcttttgtttctatggctctgtggtatagcttgaaatcatgtatactgataccaccgacattattctttcactaaaaattggtttggttctatggtcttttgctttggttctctggtcttttgtactttcatatgcatgctaagattttccttgctatttcttttacatttatttcaaaatgttttgttttgcttttgaaacagttgtgctgtgattattttgtgggggtgtatatgtgatgtgtgtgtatgtgtgttaattttataccctttcatttttctgaaaccgttcatcagatctaactttggggggttagtctttagggtctctcatatatagaatcatttcatctacaaataaggatactttgacttcttcctttctgctacctaacatcccaaaactcatcaaaatttgggatgtgataaacacagagaatgataatccatccagaaatggtctttatccatgaagtgtttccttgaaaacactctttatgttttaaaaaaacaaaacaaacaaacaaacaaacaaacaacaacaaatccaagcagagttcaatgttgtcagtagcccaggtagcagactgacatggggttgagtacaggagtcccaatcccaggctccactgataatctctaaactaaaaagtccttcagttttccagggtccccatctttgtgttggatgtagatgggggaaatgacaagaattggatctgcagtctttaacacgcatccacttaatatatttgatgagatgacttcctggaaacctggacccagggccttattgatgtcttgggcaccaatcttccactgcatactttagtcatgcaagtggctcattggtttgttttcaccatgaaggagattgagggaacggtattggtttggtccagattccctggagccatggttccgagaggcctcattacaaaatcaatgaaatgcccaacggtttgatttcaggtgatcctgcctgacctagctgtcctgagaatcgcagtctacgatgacaacaacaagctaattggccagaggatccttcctttggatggtctccaagcaggctaccgacacatctccctgagaaacgagggaaacaaaccattatcactgccaacaattttctgcaatattgttcttaaaacatacgtgcctgatggatttggaggtaagacaagcatttagacatggaagacagtgtacaagaggtcctgcattatgagactgtgaatcgttttgcccattcctgaaactaacaaaaatggccgtgtgtttttctccctgtgctgagaaccttggtggttttgagtaaagaaagcagtatatccgtaggtattatttcaaaatactgtaatttttgcttttgggcaactgaccttcaattttaataatgtgattttaggttcaaacataagccaggagagtttcaatcaggatggataggaattattcctttctttgtaccctttgcttgccattttaaaaggaagcaattagaggctgtaacatacagtaacagacataggagcccatcagagcagcttgggcagtgccatggggctggacaggtagacgtctgtcaggtgtgttttgaggccgcagtccatgtcaccagcagtgtgggcacatcgatagactgaagccaggaagaaattattctgtttgagttttaaagcaggggacataaaggctgcggtgatggctcagtgggtaaaagtgcttgctgcgcataagaaccagaggtcagatcccagcatccttgtaatgagctgggggaggcccaggtgctcctggaacactctggagggtggagagcagaatccttagggcttgcaggccaccttctgagctccagactcagtgagagaacttgccccacaggtaagaaggtagagagtgctggagcaatgcactgcacttcctatggcctcaagacaaatatagagatacctacacacataaacatacaccccccccacacacacacaaagagagtgtgatagatacttattacattatggaaagtgtcacacagacccatttggtaaaatttgttcaagttttgccattgcaatggcaacatttcaaataaaactataatttcttcctgggaaaagtgccatttgatttgaattgggaaaaacgatcatttgctgagctcctgcttggtgccaagcacttacataaagagaccctcaaaatgtggaattgatctgcagggatgtgagcgtgtgcaggtttacaccgagaaatgtttgtaatgtgacacgtgccagggccaaatctttacatcctgcaaacccatctctcatgacagtcctgcaagtagtctcccctgtggtcgtgcctactgcctttctgtcagattgttgcgaatctctgtacgaggttctgcagttggcatcctaacctcaggtttgatattcaacaacagcacgctcgctcagccctctgatcatctcaggctcacgtggtacctggggaagacactgaagatttagcagtttttggaaaagataacacagggcaaatatgaggattgcctttttttctgaatttctgaccttgagtctcctgacttacagtatgttcatatttggtgtctagtttacttcctacatccacacctcagaatttacctcacagtccccaagtatgctagtattcttgattttgtaaggacacgttcaagtgaaactataccatcacagggagaaagaaagagagagagggggagggagggagggacgaaggaaagaaagaaagaaagaaagaaagaaagaaagaaagaaagaaagaaagaaagaaagaaagatagaaagaaagaaagagagagaaagaaagaaaggaagaaagaaagaaagggagagagagagaaagtaagttactgtaaagatcattcgaagttaacttgtaaagaaacttcatgagacttcactgggtcattctgtaagtacattcaatgcaattagtccacaatcgactgggtggctagaatgattatcagagaagggtgcctgccttgcagcaagtgagggtcacttggaggtcctgagttcagagtgaattgctctacatctttcccagccctccctcactcccttccttctcctctctttctctcgttctcaaggtcctccctcacactctttctccacccccccccacgcccctcctggtagtactaaagactaaaccaggcgcccatgcctactagacaaacattgcaccactgagattttgggtcaaggccgtactaagttgctttagctggccgtaaacgtgtgctctcccattgtatgtgcaatcacaccctgcttagagagattttatttagttttaacaacacactgaagaaagatctgttggttgtaaaatcctcaccttaatttaccctgtagtttatgtaaaatggcacaggaaacaattatatcataagcaattcatcacccaaaggaaagaagtctttttaactccccactgagaggtttcagaactcctgtgccttggcagcaccgcagctctgtgttctgcatgacttttaaatgcattttcattgtcagtcattgtacgtgggtggaaacctttttataaagataagaaaactcttcttgagccttttccaaggtagggcccttgcttggacctagacttaggctcttacaggtcacctgttcattaggttctgctctactaagtgaccgtcaggtgatgaatacccacatatgagaaactatatgcaattgttcatagttatccctggcccccaaatcacgcccacatacatctagtgcttcttagacattctgaactccagctgacccaccatgggaatggtcaacagcccagatcttacctctgaccccttccattcacgggaattcctgtgccccgacctctgtcctgccgttccaagccctaggcaacagaaatagtggtcttgttgaagctgcttctcttgctactaaaatcagttacaatgcacagagaaataacagcaatgatggtttgtttctcagttcattttcttgtgctgaaaccaaacacccaaaattggctaacttataaagtaaagatgtatttttagttttgtaaagatttattttattttatgtgtaagggttttgcctgcatgtgcacacgtgtgcctggtcagaagaagtcatcagaccacctggaacggatagatggccatgatccactatgcgggctctgggagctacacgtgggtcctcagtaagagcaacaagtgctcttaacccttgagcccaagaaaaggaattttgtttctttgactcagttctgaaagcttagctggtccggttcctgctgagtgttagtgctgctttgtgcatttgttcagcggaatactggtataaggggcatgatctggtggggtttttgtttgggtttgttttaactttcatacagtgtgttttgatgagattcactgaccttgccccaactcttcccagacccacaccacttccctacccattcaactctctgtcatctttttattaaaatgcttcaaaaccagtttataatgtccaaatattcttagatgtgtgagcttttcctgggatatgtcggtttaccagaggctacccttttagagagaactatttcactctctcccaatagctaacaactgtacattgctccatggctaggggtgggattgtatgcccaactctcatctccttgctgggatttagtctgtcacaagcttgcacagggtctgtacaagtaagttcatgtgtgcagctcccctgctgtgtccatatgtttcctttagccatccaccatctctgactcttaaactctttctgtactcccatctgtaatgatcctgagctgtgggtgggtgatgtggtatatatgttccctttagagatgagcattttctgagtggatttaagtcttgctccatgagatgaaacccataactggcaccacctatggctatatatatcctaggcctcaggagggaacctactattaattattgcagatgaacggacataatattaaatcaacttttagtgacttaccattatatgcatagatgagtgcatttttcaaccctaacctgaaaagcttcaatttgcaacaaatgattaactcagtgaccccccaaactggccagtgtgcagaaactaaaagagaactgtttatacaacccagatggaaaatatttctgggctaaagagtaatagtagaccatcttaagtatttaaaactaaatatttactgaaaaaatagtaacattccttatttcttttttaaaaagatatgtcttgcagtgaatcaagaagccttggtttacatcttccagtgtcccagtcctcaatataatgataaaacggtcctctcttttctctccacaaagcagaactcctgggttgaatgctaagcacctccctcatttatcaaacctgagagactccatctgtgggcacatctgacctgctagtggtgtttactcaccacacagaattatcacatcagccatcaatgttggggacaggacagcaaatagttctggtgccaaaaacaatgtctcaatgttatatttcccacctccattgctgagggtttttcctctctgtgtatgttgtctttattaccaagaggtgaaagaaaggagatttgtctaatatatatattagacacatatatgtgtgtgtgtgtgtgtctgtgtctgtgtgtatgtgtatgtgtgtgtttctgtgtctgtgtatatgtgtatgtgtgtgtgtgtgtgtgtgtgtgtgtgtgtatgtgtatgtgtatgtgtgtgtgtgtgtgtctgtatgtgtatgtatatatataaaacattagcattaagttaaatgtcaccctaagaagtttgctttttaggtccttgtttcttgggcagggcccttcttcatcctgtggctcctctgttgctttatgtatattaagataaagtgactttatcttaatttttgtttggttgcctttctgccttatgattaaagatgcatccaggaaggtacaggggtgtttctcattctctccacccagatcttcaactacctctagcataggcagatgtttcatacagctgatacttccagagggagaatatcctcaattaagatgccatttctggagggtcatgcctggatttcctgatgcagattctttttctttcaaatatttgttgaaacacacataatacatgccatccaggggcagtggggagggtcggattgctggtgtttgaaccagggcagtgtgcatatgatgcccactcataaggcatcttctgcactctgcaaaagaagggagcagtgtgccttatggaaagtacaccagcagggcttgcgaagtagcttagcagggcagtgaaggtcctgtgttcagcactcggcaccacaagcaacgcagacactgaaagtggctggcttcagcacactggtcaggccctttcttacacatatcactaagataccctgccaacgcagcgagccgtgtgggaagagattggcttttcttggttttgtttagccctgattcccctgtacggggcatagagccttcacaggaccaagggcctctccataggaaagggaataacatttgaaatgtaaataaagaaaatatctcataaaaaaaaagaaaagaaaaaatgtcacaaaaaatggttatttaagctaaatattttcctaaatgaaagctaagtctttgtaaaccattttggaagaactattgatgatttctatggcaggtaataaatgatacttttgtgttctgtaaaattaaaaaataccactttatccaaactttattccaaaaaaagaaaaaaaaattgagttgcattttcgtgatctgttcatttaaacataaccttgatagtttgttgattgtttttcagatattgtggatgctttatccgatccaaagaaatttctttcaatcacagagaagagagcagaccaaatgagagcaatgggcattgaaactgtaagtgaagccgtgggctaacggcggtccagtggggggagttggcttccagagagtgactgccaaagaaagagagaggtgatgtgggaagtttgcagagggttttcaaaaccaagcttatccattcaatagaagttggaaggagctacaaaaatatagcacattttatacaatgtggccactatcagagagagcttcttagtcaccagtgagatatctgcagttgtctggtccattatgaatgaagttggaactatccattagaaattacaacaaggatttctttttataatgctgaaatgccaaatgactgagttcagtgagttaatgaaaatgaccgttattaccaggtactcatttctttgtccttggatcccaacactccctctcttcatctgtttctctattgtcaatgtccctttgctggactctttgagttggaacacaatcagccatccagtcagccatcccagtagctagaaaatgccgtgcttataaaggagttgggttgtctttccttgactggatcatttttcgtccagcacaagcaagctatatagtctcactccccttaggtaagagcttgcttgttttgtttaatttgagacacaggcacagtttgtagcttcgctgacctggaactcactatgtgcacaaatctgggcttgaattcataaagatccgcctgcctctgactactgagtgctgggattaaaggagtgccccatcaagcccaacttcaggcaaagatctttaaaggcaggaaagtctgggaggctgagggatttctcattaaagtaaaaatgcttctagggccaggtattttaatcatcgggaatatttttttgttccagagtgacatagcagatgtgcccagtgacacttccaaaaatgacaagaaaggcaaggccaacccagccaaagcgaacgtgacccctcagagcagctctgagctcagaccaaccaccacagccgccctgggctctggccaggaagccaagaaaggtgaggtgtgcagttcaactccttgtcagctttgtcattttagcctcgttgtagactgccttgacgaaggcatttagaatcgtcatttctgcccactttcattgtgatgctagatgaaaaaaaaaaaaaaaaaaaaaaaaaaaccgagagacttactggacaagttgcttgatttcctcctctgagagttgtttaatgggaaatcaacgattgtgttttatgggctggaggcccatcacctaaccagcgtgttatgcctagtgcaacagtgtttactttgacattcttcatggcagggctgaaggagcccttgctgctacagtgccaatagctaagtcacccacctctgtcttccagactccagcaggcaaggggcacatgaagcatcagagtcacaaatgccgtgggtaatttctccatacatagagaaaaggctttactgtttatttttaaaacccgtagatgggcatttgatggccagtttcaagtggttttctgtgagtgaaacaacagctcataagaaatgccataatacagaaacacgtgaccctgtgctgctattggacagcctctacataaggagacatccattttgactatttaaagtagtcttcaattcaagagaccaggcatccattttgactgatcggtacccatttccatattgacagttaaatatctaaaataccccttgaccataaataatttactacacacagtctgttaattttcatagtaatttctttttctcctaagggtttcttagcatgtatatttcctatttacaagttaatttaatgccagtggtacaaggagattaagccactcttacatatacatgtatccagtgctaacaattcaggggaagaagagacagtctttcccaaccaaagcagcctggtaatttagcaggaaactaagtgtgcactgaacttcatggagcaaattagaaaatgaagctttacaaaagtagcccaatctgtactggccctgcagctgtttgttcttctcaggaaggaacgtggggtgaggtaatgccccaagcacagaaggaacatggggtgaggtaatgccccaagcacagacacttcctttccagcgctggtcagtcctagcactgctactcctacagagatagacattggaaaatgcaggaggtaaagttcttgtctgacccgcacgtccatagtgaatgtagtaattgcattgtaaagtagctcctaaaacagcacacacaacaggcctccaaaggctcagagagtccgtagctcgaaatgggtctgtacttgggtttgttggtgagttagtttcctttgttccccaacaagactacatctgaacccaccaagcagctgtcagttgaacaccagtgatttcccccaatccaccccaaaggtagggcgtacatgctatttcttcaggaggcttagaagcctacaagaagccattaccatactaggttctaccaataattaataataattaataataatgtaacaacaataataataaacctgcattcctttggggatgtacatacacaggggggaataaggacaggctccagtgtaataggcagcccaggtaggtgcaatgaggactgaccagttagaacagaagaggaccctcagcaaggtccagagaggactcagagataagatcctaactgagctggacctggaaacataggtctggctcaaccagaagggaccagtacggagaccaagggaaggaggacacctgaagagaagtgggtagtagaaagtggaagcagttcacttgcccaggtctgcaaagaacttgggcccaccctgaggaggcagtgaaggacaacaccgatagtattgacatcaggagtcgttacaagaagagatgctacaagccgccagtggccctggtacacaggactgtattacagcacacaccgtattacgatcaaccagaggaagaggtcaatatagacagacacatccttcatcattaccttgtacctggagccatgctgggaaagctctgttggcctcctttcttaggaaatacgtggctaataaatgcctgagcagagagggcagtctggggtaagctgtggtcaccataagaaaagaacggaggaagaagaatgtagttatttggatatggagcttagaaaaagacaaaaagtgcagaccgacttcaagagacttcggggtcacactctacaagtggacagcaagagaaagagaggagctgagaggggatgatcgtgatgagaaaatggctggctcccacagcactgtgaccagcgaggagggggaagggcagagggccgagaggctaggagctcacaggcagaatgaatgacaggaaagaatgaaaatgaagactttgttttgagaaggagtcgcagatttagagaagtcatggctatagtgtttctgtgcaaccagggatacccacttgttgatgccagaagcctacccttcagacatgatggcataaggcgtaaaacacatgttctaatagcgtgtccatagcacataatgaggagagacggatggaaagtgtgagggtgcaaagtgacatggccctcgggaagctcagatgtggagacaggaagtgagcgattcgaacagcgccccctagctgtgcagccctcgaaatgactccaaccaccgctgcattgctgatttaagagaggattaagcatcctcgggtcctagctagtttctaggttagagtttgagaaaggaaagttagttgttctatggagctgtacagataatagcaaaagctttatatagtaaaactgaaattagccagaaactttggaacttaagatgtaacctctgacctggtttcctaccaggcaaggcagccgagaagcacagtccaacatggtagccacatgcaggactgtaaaggaggtaacattaagctctgttccttgcacacccacgtttcagatgctcgggagctacgtgtctctggatacctcacacataagctgtctctattcctgtcagatgttctatggaccacactgctctaagcacatagagcggaaccaattcttgttctacaaaatgggacattttccttcctacttagcaaattaaatattttgcacttaatttgtatatttttccaatagtgcaaaatgtaattgagggaaggtaccgttgtcttcaggatcctgcttataaagaatttggttaaggnnnnnnnnnnnnnnnnnnnnnnnnnnnnnnnnnnnnnnnnnnnnnnnnnnnnnnnnnnnnnnnnnnnnnnnnnnnnnnnnnnnnnnnnnnnnnnnnnnnnnnnnnnnnnnnnnnnnnnnnnnnnnnnnnnnnnnnnnnnnnnnnnnnnnnnnnnnnnnnnnnnnnnnnnnnnnnnnnnnnnnnnnnnnnnnnnnnnnnnnnnnnnnnnnnnnnnnnnnnnnnnnnnnnnnnnnnnnnnnnnnnnnnnnnnnnnnnnnnnnnnnnnnnnnnnnnnnnnnnnnnnnnnnnnnnnnnnnnnnnnnnnnnnnnnnnnnnnnnnnnnnnnnnnnnnnnnnnnnnnnnnnnnnnnnnnnnnnnnnnnnnnnnnnnnnnnnnnnnnnnnnnnnnnnnnnnnnnnnnnnnnnnnnnnnnnnnnnnnnnnnnnnnnnnnnnnnnnnnnnnnnnnnnnnnnnnnnnnnnnnnnnnnnnnnnnnnnnnnnnnnnnnnnnnnnnnnnnnnnnnnnnnnnntacagcatgaggtcaggaggggctgtgacaccagatacaagagatcagacaatagccacacacaccctgcccatcctaccctgaaataccatggatcccatcactgattccccccccaccccccatcaagatttccttctacatccactggtcatgccaatcttaaaagcaatcaaacctacaagcaagagcatgggtctccatacctatcctccttaaatacatcatacctgctttggggattccagtagaagtcagttatctttgaatacacaatcgttctgtttgcctacaatgaaaatctgtaatcaaacagaaccatctgaggattcttcttcggcaattgtgtttaccgtgactactctgagtccagcctttactcagctagcaaacaggctgagtgtcttactcaaggttttcatgacagaaccccttaaataggtagtctgatttcatttttcctgtgtttaggacattgccacactcaatagcacattgcttagatgctaaggttaaatctaccccaaagaagcttaccatgttttgcttcttggtgatggatgactaagataggagtcgagctggaagttagttgactgataccacgtacccaaatgcaaagatgaaaataactgcggcaggtcctaggtgcctggccgctcgatgggtccacttagcccatgccccagtgctaagaaggctggctgattgagagttatagctactcctcctcaattgccctgagaccgtgggtaaaaagcccatgcaagctgttttggaagtatcaggtataccttagaaagtttatattgtctgttatttactctaattttaatatacataatgatatttttgtgactttttttaaaggtattgaacttatccctcaagtgaggatagaagatttaaagcaaatgaaggtaaaatgtcttgactactttttagatgtccgagtactatgaacattgatgaaacaagggtttttttttttttttcatcacaaagtacaatcattatgattacctctggcaaaaggatagatggaaagaagggaagagaaagacagagagagggagggggcggagagagggagagagaggaagggaaggagggagcaagggtgggagacagggagggagggagagagacagacagacagacagacagacagacagacagacagaatgaatctcatttcggatcagatcctctttttctcccctgcaggcttacttgaagcatttaaagaaacaacagaaggagttaaactctttaaagaagaaacatgcaaaggtagtgtggttttgcatacgtggctgtgcattttgttggttcttttgtattttacttttagctctatgatgaagacctaccacttcattttgtgttgtgtacaatgaaccattcatcacccagaagactagttagaagctaatgctagacagcaagtgtgacccccgttatctcactggtaactgctggtgccttgttctctggttgctgtgcagtagtttataaaagcagtgtatgtggggagatgctagcaggggccatctctcacagtccttgtcaatataactagaaacctatttctgaactttctgtacttttattatttatcgctaagaagcctgtcagacagggatcagaagaaatcttaagaggaagatgcaaatttaagagaacaacaagaagtggccctgaggtttcccagataagttgagaaggttctcagttttcagtttctttcgattttcaggcttttttctgatcttctcttgcagaggagggatggaggcttatagaactgagttagggggatacagaactggggtggcagaatgctgaactggggcagtgagggggtacacaactgaggtgtgtgtggggggtacacaactgtggtgggattggggatgcagaactgaactatgtgtgtgggatacaggactgaggtgtgtgtaggatacaggactgaggtgtgtgtgggggatacaggactgaggtgtgtgtgtgggacacaggactgaggtatgtgtgtgggatacaggactgaggtgtgtgtgggggacacaggactgaggtgtgtgtgtgggatacaggactgaggtgtgtgtgggatataggactgaggtgtgtgtgtgggacacaggactgaggtgtgtgtgtgggacacaggactgaggtgtgtgtgtgggacacaggactgaggtgtgtgtgtgtgatacaggactgaggtgtgtgtgtgggatacaggactgaggtgtgtgtgtgggatacaggactgaggtgtgtgggggggatacaggactgaggtgtgtgtgggggacacaggactgaggtgtgtgtgtgggacacaggactgaggtgtgtgtgggggacacaggactgaggtgtgtgtgtgggacacaggactgaggtgtgtgtgtgggacacaggactgaggtgtgtgtgtgggatacaggactgaggtgtgtgtgtgggacacaggactgaggtgtgtgtgtgggacacaggactgaggtgtgtgtgggggatacaggactgaggtgtgtgtgtgggatacatgactgaggtgtgtgtgtgggacacaggactgaggtgtgtgtgggatacaggactgaggtgtgtgtgtgggacacaggactgaggtgtgtgtgtgggacacaggactgaggtgtgtgggggggatacaggactgaggtgtgtgtgggacacaggactgaggtgtgtgtgtgggatacaggactgaggtgtgtgtgtgggacacaggactgaggtgtgtgtgggggacacaggactgaggtgtgtgtgtgtgtgatacaggactgaggtgtgtgtgtgggatacaggactgaggtgtgtgtgtgggatacaggactgaggtgtgtgtgtgggatacaggactgaggtgtgtgtgtgggacacaggactgaggtgtgtgtgtgggatacaggactgaggtgtgtgtgtgggatacaggactgaggtgtgtgtgtgggatacaggactgaggtgtgtgtgtgggacacaggactgaggtgtgtgtgtgggatacaggactgaggtgtgtgtgtgggatacatgactgaggtgtgtgtggggaacacaggactgaggtgtgtgtggggaacacaggactgatgtggggttgggtatgcagaactgaggtgtgtgtgtgatgctgaactgcttttccctcttgagaagcctaactactgcacccactgtcaggatcctgtgagtcacagagagacagagacccaatttgtttgtctgaaaggactttgaaactctttcatgtaaacattgcttgcccacttctttgtactctgcccaggcaccatgcaggtctgtgcttcctgctgggagtgaggaataagcataccaatgtgccaatggcatggcagacaggcttgtcctttctctaatggtttgttctcagtctgtcttagtcagggtttctattcctgcacaaacatcatgaccaagaagcaaattggggaggaaagggtttattcggcttacacttccatactgctgttcatcaccaaggaagtcaggactggaactcaagcaggtcaggaagcaggagctgatgcagaggccatggagggatgttctttcctgacttgcttcctctggcttgctcaacctgctctcttatagaaccaagactaccagcccagagatggtcccacccacaaggggcctttccttcttgatcactaattgagaaaatgccttacagttggatctcatggaggcatttcctcaactgaaactcctttctctgtgataactccagctgtgtcaagttgacacacaaaaccagccagtacacagtccaaaccttacctggacccatgatgttccctgtgctgtggagttgatagttgagcatgtttactgacaggtcacttccacaactcttccatactctcctgagcacatgttgtacttatttctatattgcctggcaaaataccatgacctacacaacttatgaaagaaatcattgcatggggtctcacaggttcacagggtaaaagtccatgaccattgtggtagggaagaagctgagagcttacaagtttagactacgagagagacagagacacagagagaaacagagagacagacagacagacagggaaagacagagagaaagacacacagagagacagacagagagagactctctcactgggaatggcctatgcttttgaaacctcacagcccacacccaggaacacacatccaggaagggcacaccacccaatccttccctctcttcttggcaaggggtaaagaattgttaaagatgttccatttaaagatgagtgcgtagtctctcttcaatactttgaccaattatgagtccctgtactgagggctgcccactaataaaaggagcttttcccaccaagattgggagcagaccaggtctgtgggtgtaaacataaatatatagaaggcaacatgacaaagcgaccatttaataaaataacaatagcaggttctgtgctggggcttatgatctcctaagccctggtcttgtgactagaattaccataccagcatgaaattccttcttgtgaagcaggtctcagatcccatcagaaagtagttaccaaccctgtaacagccatgccgctattgcacgggtgggtacacagcgtctgtctttcttcaggatttaatttttagcattgaattgttgggctagagccacagggcttcacagagatgcatcttgtgccagcccagactgagttgctatctccaagcaaggtgtgaaaatgctttttatttttttttaataaaagaaaatcatgctttatgacctttttgtttctttttttccctcttttattgaaaatagggttttttttcccctcacatactatatcctgtgtagtagtagccggcccgcggcctacatgaaccaggtattcctggaaggtaggctggggctgaaagagagactaggtggcaagaaaagaatgatgaggccaagacaaatttttctctgatcaaggcccacggagtttactaagagannnnnnnnnnnnnnnnnnnnnnnnnnnnnnnnnnnnnnnnnnnnnnnnnnnnnnnnnnnnnnnnnnnnnnnnnnnnnnnnnnnnnnnnnnnnnnnnnnnnnnnnnnnnnnnnnnnnnnnnnnnnnnnnnnnccccccacccccgcgccgctgcccccgccccctgccagtccatccctggtgctttgtcgccatgctgtcagcacttcgtagccaggctgttgcttattcaggaatgtctcaggaagaccggttcagcaggtagcagaatctcagggcagttgtcacttcaaaagaagccagccaagttggaaagctgcaccgcaggtggccccacctcagtggcaacaaggtctgcaccagcccgcttcaggctgggggaggctacaattctgattttttatttccttccctcctctccttccagttcctacctctcctccaattcagattcactccctttctgtctctcattaggaaacacacaggcttctaagggataataacaaaaataatataataacataaaacaaaactaacacattggaatgagacataacaaacaaacagaagggaaagagcctaagagaaggacaggaaatagacatagatgcagagacccacttgtcacacactcagggataccaccacaacactaaactgactgctatacgtacccaaaggaacaatgctggcctgtgactactgcccagtctctgtgagtcatgtgcgtcaatcatgttgctttagagggccttgtttccttggtgacctccatccctgctggttcttatgctcttcccacctctgctcctgcagggttccttgagcctcaagaggatggagaaaacctattgagggcagagttttccaagaactcactctacatattacctggatctgggtctctgtatttgttcccatctgctgcaggagaaaatgtctctcatgctggctgagcaaggcactggtctatgactatagcagaatgtcatttggagtcattttatcactgtgttcttttatagaacagtaatgattggttttactctcgatccctgggctatctggtctcagctcactcaagcagtgttgggtatgggttctgtcttgtggagtggtcttaactcaaatcagacattggctggttggttgctcccccaagctttgtgtctccatcgctctagcatatcttgcaggcaggacaccattgtagatcaaagaatttgtagctgcttttgtatttgcatccctcctttggtagtgtttaagagttccttcctctcccaaagcccatagcacataggagtgaggctctctgtggtcataatggaatattactctgcagttaaaaccaaaacaacaaaatcatgaagttcacagataaatgagtggagctagaaaaaaaaaaaaaacatcctggggacataactggacccgaagaagacaaatatggtatttatccacttatatgtgaatgttagctgtaaagtcctcaataagtaggctgtaatccatagccacaggggttaggtgtggagtacaggactagtaggggacagatagatctccctaggaaagggaaatagactaattatggacggatggtgtggggactggaatgggagggtcaagttggaagggaaagggaggaggaagagaagggaggggatgtgaggggagagacagctaaaattaagggccatgtatggaatagtatggaaacctaagacagtagaaccttaataaaatatatacatatatgaagacaaactaaagaaaatcgacaaatgttagggagacagagccccaacttgtatatctgttgccacaagaaccaggaatagattgaactccgatcaagtcattgtccaaaggggtcccatgaaaatccccaaacaaacacggctgttttcagaactgtagcttactctccacaaacttacagaaaggccctattaccgcagacagcacctacgtcacccattgaacacggcaacgccttttaaacaagcatctctcctaagcccgtctccaaacatgaaagttagttccaaggtgaagcagtgaatgacagcaggaatgtgagtgtgagaatctgctattcataaaagtaagccctgaaaaaaggtctctgatacggtggtaggactgagacaaaagacaagggtaatgaccgctgtggcccttggctgcttatggtcaattgcttttggctctcggaatgcagctggtaattaggattctaaatgtctctccgcttccagagtcactttttcaatctgaagtggaaagtagggtaatggttcttgggagcccattagacctgacacacaagaaagtaaagaaaccagcaatcctttccaacagtgagctcaaggtccaaatctagagtcactctcattaagagacaagcatgattttcagttgtctgtgctggtcacgtccttaaaagaaaatgttttaaatcccaggttagaggagtactaccagtaagcaattagaagaattagaatccagatgccgtcagccagtgagaaggaagtagctaaggggagttggtcttgcctagacttgacaatagtcgggaaagtaagagcacttattcctggccaagatcaagagactcagtgtctacaccttgaaagtatgagaccctcgcctgttctcccgaggaaaaccataatccaagttccttatgggaattccctgctttccacacaaccctccagctctgtgtcttctgaaaacaacctgaggagggtgggaaggtagatgtaggtctaggcttgtggcaccaacatcaaatgagtcaaataaagcaccgcaaaaacctgcacatccatggcatgccacggggtggcgcccacggggcggggagtgtcttggatcattcgcttgtactacatgcagcttggcttttaataatgttaaaaatcccaccgcaccacaatataataatcaggcaaaatggtctacaatttcggtaaagctactagtgaagaatgtgtgctcggctctgcaagctgtgtaactgataacaagaaggctgcttctgaaattggcagttgtaattcacacggaggcatcaagaacattacctctgttaggagaccggacgggtgatgggactgccggctccatattctacttctccacatcctcccagtttagaaaaagcccaaatggctaatcacgatttcggcagttcatgtgggatgccacttgaaagggggcctcccttttgaagtggtgtgttcattaggctgaggcggggactcccttttggggggaagggggctcaaggcagggtttctctgtgtagccctggctgtcctggaactcactctgtagaccaggctggctcgatctcagaaatctgcctgcttcccaagtgctgggattaaaggtgagtgccaccactgcccagctgggggctccccttttagggatgctcttgaacgctaatgtttggtgaggaccagaagcctgcttggttctcagactgcattatttagtggctttccaaacaaacactaggggaagctgacaagaaccaggctggcctggcagggtaaaggttcttagcgtccattacagtccagctcataaccgtaaactctccttgctcaggagcacagtaccatgcagaagttacactgcacacaagttgacaaaatcgtggcccagtatgacaaagagaagtcgactcatgagaaaatcctagagaaggcgatgaagaagaaggggtaagactgatgattgacttgcgatgcatcccccctgtaggagtgtgactcagctgccttcatggaccacaagggactcagtgttactgcgacttcatcattaaagactacccctaggaaaaaaatgtgatcccttcatttcagtccctgtgtcatcacagcggggtgtggcatcagtcagcttagttgtggtttaaggatggtctcaatagagttctcagaacctttagttcatggcaatctgtactgtgttttggggtttttgtttgtttgtttggttagtttggtttggtttttgttgttgttgtttgtgattaagaagttagcaaaaaaaaaagaatttaattactttcaccctaagaactggttgtaacgcctttgttttataaataattttttaaagttgcaataatgtagtagttctcctcagttccactctctagtattctaattagctgcaacccaccacactccaagacgaatttctatcatggtatatgacttgttaattggtctgtgttatcattggctaccattacacttcgctgtgtataatggacacagtaatcactgccctaggcctgtgagtgggacaaatatactacagctccaaatacctggggttttagatatccacagggggaagagggtggcttggaacttatgctgttgtgcatgtaacttggcctttcataatgttaaaccccatcttccctcagtaaaataatcaggcaaaagagttgacattgctgagataccgctggtggaacagcagtacattggctggtttacccgaccccctttctttctggggttccctctgaagttgcaccctgcacttactgtctgcacagtcttctcactctgtcatagagtctgactctccctgtctttcatgggcttcagttttgcggccactcagccacctgtacaatgcctctaatgtgacttctagagtaagtagagagaggttacagatctgtgagtgccacaccctaaggggtagcctcccccccagtgcacagggtgccactgcaggtgatgatgtgttggaaatggcagtgctgacctggccagcgtccatctgcatgtcccgttcagagctttcccccctttagaataagtagcttagggaaataccagacatattctatttctttcagacatcattttgatttgctctccatcagttgattgtatggtttttgtctttgttttcgtttttcaatgttttgagcgcccccccccccactagggtcttctagccttccatggtgtgagacaaaaggaggagatagacatctttctagttttcttctttctttctctttagtgttcaatccagataccacctagaaaactaaggatctggattcagatggattgtttttgttacaatttctggtccctaaattctaatttcatgacatggagccaatgtccttggcttgaagcatcagtggcagataatgatgtgcccacactcaaccgggggctccttttggaaagcaccttcctttttattacagctacattttctagaaaaacacaaacaaggcagtatatggaagcgatccaccttctgtttctcccatggctgttccatgtttcactgaagcagagccatgtccccatgctttaaaagcatttggattttttttttttaagtgagtcaggacaagctcagcagcccatctcctgtgcgcagggacatactgggagggaatgtagtgagtgtgagagtgtctatgttgttagttctgtgacactggccacactactcctggaatcactccgtcgtggtggaggaggcaggcagagcagcaggtcactctccttggcagaagcatgcggaggatgcagacactcatcactgaggaccaggaaagataggcaccagcagcagttcacaccgtcacaggcctgctctaatggcctgcttcctccagcaagatcctgctcctaaagccccgcagcccccagaacaagagcctctaaaaccacatcacacgcaaaccgtaagagctgatgtttagaggctctgaccacatcagcagcgttaccttttttttttttttaaagaaactttcccatttttaatgtaatttttaaaacaaaatgttgaaagggaggtatagaccataataccatgtttttaaggtacaaggttttgatggatttttcagctctttccaagagtaaacttatttttgtttacctttcacttaccaacaaatgtcctgtgtttttcctggattgctatattgacattttcttggttttttctattttcaaaaaaatcattttttgttattttgtagaattctgtacatgcatccaatgaaatacaataatatctaccttctatttcctccttctgaattcccccatacacatcttcctcccaactttatatcttacttttcatttaaaaaagcaaacaaacaaacaaacaaaaaacactaagtccagttagtgcagtttctatgtgcatgggtgtggagcctctttctatatttttaaatcagtgtcttgtaagttttcagactctgtactacataacaactcttcagagagggatactagggatatattgtccctgggacattagaaaatacccatttaatcttatttttattctcaagcataagtggtatgaaggtgatacttaggactggttgttaaagatgagacaatgaccatggagccgtcctcatgagcaggagttgaagtcctacaatgtgtaaagccctttgtcacgcgaggaacaggggacccaggaagcctgcctgggggtttctttctaggtccatgctgccgaatgcagatctgcctcccgactctgcagagagaattttcccagtacttgaaaacaagacctaaaaaaaaacacattgaaagtttcttcgaagccagttaccagatgttctcatctgcacagccagctccaaggagaacgtcctcttattgcctagactttgttacctggttgctgaaattcatgtaaagggggagtttggttatatgcctttgatcctctgcagtggactggctaggctggctggggtgaatgcaccttgcatttctgatactttcaacttacagtgtgggctcatcagactccatcccatcctcagcgaaggagcgcctgcagcctgcagccgtgtcccctgttcttcatacccgactgaagggagcgatggaagcgagacagggagtttgcactgaagtgctcttgcctaactgtctctcatgagttttccattcagtgtgtttcaggtgacaggagaaggtgaatggggaaggcagaaaaagaaaagccagggttggagaaatcagaatatatgtttctgcaaaggcagacaataaataaggcatatgcaaaagggaataattatgcagccgtgacttcttaatactacagggatccttagctatgccggctgcttaagggcgctgaataaaaaccatcgtagcatttattgtgagcgttcctggaaggaagccagaggaacatttcggcatgctggagaagaaatgcactgagtgctggccattgaggagcagagggtgtgatgggagtttgcagcagagagcgtttctctcagggggtgcttctttaatagaacaaagatcgtgagccgggctagcgtaagccagagcatacgtgctgaggacagagcctaggtcctgtcctggtttcagcaataatgtggagaagaaaataccaacacagaaataagcagtaatggatgctgggcagttgcctgatatatattttctactcctaggaagctaagaagccagcctccctcccttgtcaaagtagtgccaataaatgctattttcttcctcattggcatgtttaaaagacaaaaatctggctttatgaccaacatgaaagaattagacattcatttcatgttggctgtttgcatccctaataatattctatgaaataaataaaaaacggcttgaagaaaaagaggaaccaaaatggaaactctgacaacagaccctacacaaggcaataattgctaggtctgaagtatctctttgtgctgttgttgaattgagcaatcacgctacagataatattttctaaggtaaaaatctattgctggaaatggatgctgcccaatgagccatggcattccggatatatttgatgaatatattgtcttcaccagaaagtgttgttacagaggcccaagggaactgaaagatatctaatttctggcatgcattttcaattctatattttcaggggaagtaattgtcttgaaataaaaaaagaaacagaaattaaaattcagaccctgacaacggatcacaaatctaaggtaagaaaaccccggtttttgcatggtgacttgtaaaggatactttatagtttattttagaaggggcaactctggattgatctggattgatctgatcagaaacaataggagagagttggactgctaggacagggtcggaggtttgtgtttgcctcaggtttactgtctttgagaagagccacttcacggaagtctttttgtcttgtgtgtagaaaaaaaactaatgacatttatgttgtttgatgaccctgatgcatgaagtaaaacggtgagccggtgagccaagaggcaaggaaacagtgaatgtacagaacataccttcctagggaggtaacatcaaacatgacacaggaacagccagactgcgggcggagtacacacttacatcttactgcatctttgtgaggcctggatgtcatgctgtttaaaatggatttctcctttgtgttttatctttggtgtggcaggaaccgtacacccagggatatgagaattagtgcttcatgcactattgccttgtgttttatatactttcctcctataacacggaaaccttggcgatggtctcagtttgctttggctgtgtgctacgctgccaaaacttaatgcctttaaacaactctcattgattagctcattattctatgggccacacatctgagccatattcagatgggtgatgaccctgactttgtgggggcacactcaagcatctacagttagctggggttgctatcctcactctgcaaaatgcttgtgtttcttgaatgacctccacctccagcaggacagtccggtctcatttaaagggcaacccccatagaataggggaaagacctctgctttggacatatttgccactatctcattggctagagcaagtcagagagtcagatttcaggagctggagaagcagcctctagctgttgactagagaactgcaaagccacaactttgcacaaagtgtggtcatgagaaggagaggtcttcctaccctagtgtctattgagggtgatggagtaagccagagcctaggcataagagagcgctctgctctctgttcagacctgtggactgacagaaatggagctggaaaagcatgagatgataaagagaaatatgctgaaactgaccaagatcaagacacaccagagtataagacaggcagtgaaataccgggccgacgtaagctacttaacagccagagtggtgatttagctcggtacagtagtgactagtgtgtattatttttgtgtggcttgtgaatgtccattgattcacaatataaattgtgatctggcctgcatacatagtcatgctttcagcgcatacctgactcaagagattccagatgaccccatcccatttttttctgaaacaggtcaaagagattgtggcccagcacacaaaggagtggtcagaaatgatcaacactcacagtgcggaggagcaggaaatccgggatctgcacctgagccagcagtgtgagctgctgagaaagctgctcatcaatgctcatgagcagcagacccagcagctgaaactctcccatgacaggtgggagggccagatgccatactgctatagatctttgtgtcttcaaatgactggtgcgtgtgtgtgtgtgtgtgtgtgtgtgtgtgtgtgtgtgtgtgtgtacacaaaacaagcaaaaatcaacttgacgtatttcgcatacttagtgtgagcaagctgatttgtaagaagtagcctctgccaacagtgacttataggtgttaagaaggtactacaatcaagtaaagttagctaagattgcaagttgctataatccatattaaaatatggtcttcctcttctaagtgttttgaggatcaacagtaagttatggctggaagtagaaaggacctgaatcctctaggaatatgaggcatggggagaaagcctggccggtggagctcctaggatgactctcatctcacagtggcaatgcattagagagcctcctcctttctgtatgttgttaggcatattgtgttagaaatactgccgggactgagcggactcctccctgcgtagaagagcatgtctgctgactgtatctttccatcccagtttgctagcagcgtgctttttccctattaaggatctgctgtatgccacagttatggtatgatgctggtttacacaggacagggcaaaacaaacacttttttaccaatagagaaaaatgatcatttttaaaatggcaactgcataagttatatggtagtatatgaaagttcccagccttgctttaggtgagacatcctgctgtgagaaaatagagtggtgccttaggtcccagtgcttgtgtgaggcaagtgaacagtgtctggcatgatctggttccgtcaagaaatgttctgtactctgtgaagtcctaagtacttcgtttacatattcagtgtaagagctcgtattcctttttcgtcaagactgcttttgattggatatgtgctatacaacgagtctaggcagcatcccatcctgcctttgggcaatgctgcaatgtcagcttggaggaaccccctgccattattccaaaatgtgttagagtctggggcacttcctggccatcactttagtaactgcatgaagaaaaatcatgagtctcaaacttagatattttttgaaaaaaaaattttaaatgtaatttttcattgcttaggaagtcctttttgaaaaccacaaacccagctgctaatttgtctttctaagtaagtctgtgctaagagcaactctcggagtgagagtgggactcggggtttttttcccctgcctgttagatggtgtctgttttgcttgctaattcgtattgcttttaccaaatgcttgtcattcatacagtgggcattcgtaagtgttcttgcttgaaggaaacaaaggaagggtagggggcagatcgatcactttacaaagaaatcatgggaaactctgagagtggttgctttgggtccagcgtttttctcagtgtcctgctgatgagatgtaaggtggctggctaaagcttcattttagcattgcccatctctcttgatgtagagtaaaccactggacttaggtaaccagcctcctcgcctgtacattgcaggcaaagacataaggggatgactataagttaaaattatttgtaattgcatcatttaaatattccaaactatgtgcctttattgtctacaagagtgaatcaaagatagacatgtccattatacatacctgtgcacttacacaatcattagtcacctgaaatacatacaggtctacttcctgtacttacttgaaactacatagctccactcgtgtctatgggttgtttgtcagcaggaaggtcacttgtgaaagttatagcatcctgtcgctcccatcctgtcactgctgggtcccagacagttcatggtgaagctggacacctgtgctttttttgttggttggttttgtttttgagcaaatacagcatctgatcaccgaccatgatgcatgcttccactagatggcactaccttcctcagccatctccattcacctgagcctgtcagttgtgtaaagaatgtgaacctagtcctacggttatgtattgtattgaggtttttatctttcgtgttataaatcataaaggcaccctttaggagtgtggcacaaagagccatacattcgcattgctataccctcttagcatatatcagaactccatctgaccgctcactgaccttcaacggtagtctctctggattctaactctcctctgtatgcctctacatttatttacttttatttctatttcacagggaaagcaaggagatgagagcccatcaggctaagatttctatggaaaatagcaaggccatcagtcaagataaatctatcaagaacaaggcagaacgggaaaggtaagtgtgagggtgcttgctgggactgtctagtttactgggaaccagtgtcagcaacatttggttatgtgaactcggcatagatctgagatattaatactgtggtgttcgaagagtcctgttagtacagtttctatggaagtcaattattactgcaataatagagtagtttctgatgttttcctgataactgtcactggtaaaatgtatttgcattcacacaacatatgtacaaacctgacaataattgatataatttcatataattctttagcatttctcctcccatcggtctgcaaacttctctcctgctccagtgtcagcgcgtcctgggtgagatgggtctgaatatcaggaaggcttcctcccaccttgatttgctgcctttgtcaataggaactatctgtaaagtttccacatagatttttttctcgtttgttctcagttaggtgggctttctagaagaaactgaggcaggaatccagggaagacaagatggggtggaaccagacctgctgtggtaaggctatggttgggctttaccacagctggtgaagggaacctgagacagagcagcagccatgctgctgacaagggggcattgccagtgaccacagataatagtcacccatcatgatccatctctaaagacccaaagccatctattctacaaatagaagaccaggcagagctgaggagaacaatggctatctgggctcctgctcacaaagaaatggtatctaataacgtccaggtccactgaaagactggtttctgctctacaaaacacagaattcagattagctcttggggaccaaagagtaaagtgagtttagaatgtcagactgatgcatcactccatgaaacatgggctgctagaagactctgcagcccaaagatgggatcttctgggcttcatctccagattcctggccttctgagatgctcagtggatactgacgttttaggcaggactgcctcggttgtatttattcttttcagttcttaaatggtgctaggtaataataaatcaagatatggcaaaatataaagcatccaactagttaatacatcttttatggtaaagttttataaaatgccttttaaacataatagctccacccctcaatgggaagtagcattccacagtaatctatttattattatatgtatttatttactttatgtgagtgtttgtatttgtgatgtgggggaggggagagcatacaggagctgccacaatcacacagggtgctcatatgtaggtcagatgacagcttgcaggagttggtgctctcctgtgggacccagggatcaaactcaggttgtcaggttggttttaagttcctttatcccttgagccatctcactagttcgccacagtgattttgacctggagacaaattgcttttttattttaactgtttggccaagatatttctcaatcattgtggagtgccatctgtgcctcccagtaagaaggttcaggggaggacattagtcatctgttcaagcaattatttgtaggctggtattgtagcatctctttggtgcttgttcacttttcaaaggtgccaatttctggacattttcccagataaggatcttcgtttgagagtcttgtatacatggaaatacatcttctacccggaaatctcaaatatccaaaacataataaatacaaattatttttgtttgattttcttagactctggtgttaactttgaactcctttagcctgtacaaagtgagatataacagtcagcatgaagaccagactgctaagtagtcattgattgtgttttatcaaatgtgttacagagtggaccaggttcagctgagtacaagctttccttttccttttccttatttttttttttttacatgcaatgcttccctacatttttaaggctaccctggaactcattaagctcctcctgtctcagaatattgagctctgggatggggggaccggccactcatctcagctttcaaatcaccctaaactttaaagtaccactaataccatcagctaggcttttgaagtagccaggtgttgggggtgcacgcctttaatgccagaattcgggaggcagaggcaggaggatctctgggtttgagaccagcctggtctacagtgtgagttccaacacatccagggctacacacaaaaaatattatctttattttgatttgtatgtattgactgaaattttgtatccatcattacatggttctaaagcatcaacaaattgctgtttctataataataataataataataataataataataatagtaatagtaataataataataacaaattgctgtttctataataataataataataacaacaacaacaacagcctctctgccaaaaagccacttacctatacagtagcatattatatatagtgtggctttggctttatcacactgctgaggactaaggctaaagacttattataggacttagcaagaccaatagaaactaaaaaactattcttttaaacagaaattatacggtatttatatataaaattaaaatgcagacactgtttatcatggacagaaattatagcgacttttacatgaaaatcatgggtatttcttaaaagatgtgaaaattaatgatctgaacgctcaaagaatggagaaaccaaagtgaacatcaagatcccaggtcaaaataaataacagaatgcacaaagtgctaaagtaggagagaaaaaaaaaaagcaagagaaagcatgcagaaaagtaatagcttatctaaaaatgaaaaacaaacaaacaaaaaaaacccctagtgactcactcagtagattgtcagcaagaatgatcaagaagagaaaagaaacatgaattagtgatatttgggatgaaaagtgaaaataaacagaggcaaatcactttcaaagcagctgtaatgctaatggtaaatctgaaactatgcatagaatggagaattgcttcggaaaatacacacatccctgtggacagccctgcatccatgtgaatgcagtcagcactaattggatttgggggctattaatggtgataataagaacaaaagaagacatgaacatggagggcaggccttgggggaagctggaggaaggcagtaggaaatttagaatgttacgtgtatacattttcaaagaagaaaaagaaaatactagtctaaaagagaaaacgaaaactgcacatgccgtgagcacaaacggagaagcctaagcggacaccattactgcaggagttcacccagttctgttgtgtagtcatgaaaaacctccgaactaacataggggaggaagccgtggggtgaagataaagccataggacgaagatgaagttgtctatatcctaccagcaagcaagtcttggagcttgagtttctgaaggaaatatacccaaaatatcctaagtcctgaaaacacacaaaatgattttagcgtgccgactgattttaacagtgctttgtgggatcccattagaaatgctgatgcccaggccctctcagccgcactgagtcaggctcttaggtttggagcacagcagtctgtctgtgacacaggaaaatttgagaacacttagttgtatttcctgtggatacatccattttggttaaaaatattaagatatggctaagtaagcctctgtcagcctcgggacttcctccaaggagaggaagaagggaaaatagaatgtgaaggagtacagaggaagtttaaattttatgtataaaattctgtctttaaaaataggagagcagggactggacagatggctctgtggttaagggtgcctactgttcttgcagagaacctcagtttacttcccagcgcccacttggcaggtcacaaccgcctgtcactgttggagaaagtatttaatcccagcccccgccgttgctatttaagttcctggatgaaagacacacacacagctttatatttacaataagcctgcaacaacacaagagctgggcagacatctaccctccatactgttaggatctactttcctatcaataaccccgagtactacttgctatgtttcatctgggctgctcttaactccaattggccagcccacaagctcaggttctcttgactcctaagccatcctggcttctccttcctcctcccgaactcctcttcttccctttctggttctcctcagaccccaagccctgggaaacctaaaccccacctatgtctcttctacccagctattggctgttggcatctttacttatcaatcagaaatgacttggtcacagggactacatacagacttcaggacttgggggcccgcacttagcagtacaaaatctcaatctataactccagtaccagaggcttcaacaccttctgtcttcttggggctcctgcacatgcgtggtggaaataaactcacacaggtaaacacacattcacaagaacgggaaattataaagaaacataagtattggttaatctgagtgatgtgacaaggtggttttatattttcctatctattttgtgtgtttgaaaaaaatgatacaataaaaatgaaagggaaaggatgcgacagtcttctccgggaagcgagagaagacagtttgtggtgggtgaaagtgacagtcccacaggctggtggactgacagttctttgtctccattgcttttaggcgagtcagggagttgaacagcagcaacactaagaagttcctagaagaaagaaagagagtgagtatcccatgtttttctcgacactcctctttggaaaatgtaacttgtgcttgcatctcagccttgcaagctcatttacctaatttcattttttacctgtacattaagtattccagctttgcccctccctgaaagccaaagccatctcttactaaaatcattatggaaattaactgacatggctttgtggaggtgacagtgccaccttccagtcatgcataagtgctcagccattttctaagacttgggaaggaaagatctgcccaatatacactacgagtttaaacccttaacagttttcaagctcttttttcattcctttttgaaaagtgtgatcacccccggctaaattataaacccagtaagctatccaccatttataattttaagacaacatgacattgatcatattttctttccagctggcgatgaagcagtcaaaagaaatggatcagttgaaaaaagtccagctggagcacctagaattcctagagaaacagaacgagcaggtatttcatcccgtgcaaataacagacataggcggcccatcagcttcaggggtgcagtgccatggcccacgggaaccctgtggtcaggaaatacagtggaaggtagagagactttctgggtcttactggacttcctcctcttcgtccaaaaagaacagaagtgccttttgtggagggggagaggcaagaggctctgggggattaagagtgtaaagttgtcctttgagtctatgacaggatgggttctaagtgtgatggccctaagcaagcaagttatgaaccacttcttcatttctgtttttagctttatagcttacaggctgcacgtgttagtgtattaaaagtaaaagagaagaaccgtctattttcagtgccaatctaaaaggtgaacttgtaaattcttcccagggctttatggtgggatctaaatccatgccccccacaactcaacaacccagtgaagagtgttcagcagctttatggtgggatctaaattcatgtcccccacaactcaacaacccagtgaagagcatcttctcggggtttgtttgtttcaaaaaaaaaaacaaaaaaaaaaaaaccaaaccactcaatagagaagaacagttgtacacagcagtagttatccaagctccacttagtcagtttcgacacctggacaagtctgtttccacgaagcatgccaagtgtagtatagcaggctccatcccatgtgacccactgcccagcggccttcctttgaaccctagctccccaggcgggaactcctagcaaggcgcacatcttttctgtctcacttggtcccgtttcaatcttggttcaaggcattggacttggatgtttatcttcacattttagaaactgtatagagcttttgaagaaataatcatactgcatttttcttttacatgtcttcccttctaaaaagcaatcctacctaagattttttttcagagttaataactcatcctgaagagtacttcagaaggaattatactttgaaaggtccttaagagaggaacacaaaaccacaaagtcatttttttgtgttgtagcttaggtaacaaacctagcttcttgtttcaagtcctcgctcttgctctcactctctgttggacagaacccagtcctcttgtgggcatgaattaagttcagctactcagttctagtcataaataccgcccgggtcctctaagagaggcagttcacatgtttggtcctagctgtccagttcatttgaccaactcataaatacatcaggtacacaccatacaacttatgctctttcctgaaagcacttctcagtatgtgtccccaaggtgacatgagactataagaaagggttgagccactatgatctccaaagcttccgaactcactgggggctgggggaagatgttcaaagaaagcagaggataagcatctctgaaaggctttcgaatcttctttcaaagaagggcctgatgaaaggcaaggcacgcttagggtttaactatctaaattaagaaactatttagaaattactgtgttgcttagcaacaagtttgactaaagaatgtaaatgtgctaaaaattactcatcactacatagctagagaatacagttttcaggtgttggtacttttaaagcataataaagaaatcactatgcgcattatactaatacatgggtaccttgaactatggaagcctacttgcattaaaatcctggattactggtagttgtattgattggaccatgttggaaagatccaggcttttttgttcttaaaactcacatattacctattaatatgtcataagtacatctaccacccacaaaagtgaaattttgagtcacagaaacttaagaaagcaccgaacgtgaaaaatatccagatgtaaaaatgtaatgattttcaaggaaaagtcattccaatagaaacgttgtgcaaatgtagaattggggattgaatttctacattcagctttaatttgaaaatataatatcttgttgcataaccaattaaacgcccggttttggtagtatgtatttttttaacacgcaggtcaggaagcactgagtcctcagtccctctgtctgctataatcctctcctgtgcacagggcagagacgcagggaatcccctggcttcctcgtaaacacaaaggctgaagccatgtaacggagctccattaaaagccaagtacacattcctttagcaaaacaggtcaccatattcacacaatcccagactcgtaaagcaatcttccaaccctttgttaagccccaggtttcttccttgtgtgtaaaccaaagatgctttaatctacacatctatattatatcgccttttatggtttcttactttttcctattatagtcttcctagccatgccctgtcaaccccaaaataaagcccggtggatctatggaactaacgagaccactgtcaaaggcattgggcgaaacagctaaagggctcacactgtttggtcttgattctggatcctgtcctttgtaaagcactctctagcctggcttcttttatcagccagttgttcgcttagcttcccaagggccaggacatatatgtacacatattgtaatcttgtgacttagtttttctcatagtcctccaaccacccagtgttccatctgtcttgacatgtaccatttcagacatttaatgattccatccctgtcacatttaagtcttaaaaattagtatctgtcatcaaccctatcattcaatagagtgagggaaatggctcagcaaagctaagtctccctatgcactcactggagagtgacacacgatgtgctaataggcattggttgtttgttttgttattccttttttcctttgttgagctcagcttggggaaagttgttgctgatgggtgtgtacatgttttactcttagcttttttgcttttctgtatatagttttgcattcatttctcaaaatcactttggtattcatttattttctttgttttctatatatgactcaattttgacattactatttttgtacaaacagcttttgaaatcctgtcatgcagtgtcccaaacacaaggtaggactgaaattttgatgataagcaagaccttgctttccttcctggctatgtcagtattcttggtttgatttccatttatgactgccatctggtcatagctaactgatatcttaagggtttagacttaaaaccctggctatttcatgcttgaattcctcatactacttaatgggaaatgctgtcacatttgcttgtgggagtgttttatccagcatttccaattacaaatccaagaactgggttgttaccatgaagacaacccagactgagaacattatttttatataatgtctgttggtccttttcgatgatgtaatgttgtggtctgcgtgcagaaatgttataatacaatggcttttgccatgttctctgttaagtctggtctgcctatggctagtcaccccttataaggtgactatataattgactcttggaaacagaatgtttttgagaaagatgtctgttgtaatagccaaacatctgctaagtgatcccaggcaataaaaatggatggccacgctacttgtgttacaacttagctctcagggcaatctttgaatggcatttcattatgcattttatactatgttcaatagaatccttaaatgcaaaggggccaaaatgtagggaatcttttattactgtttactgaacaccaagtcatttaatttccagtgctgaaaatgtgtcactatcatctctcacggatactgtttgtgtcattatttcatgtttgtatattttctccatttcttcattttcttgtgagtattactgtatgtcagacattgaaaataatatggctagagggactcactagcctcaaatatacatggatctaaaactctttagtgatgctatatctacccgcactaaaatgaaaacgaaagccataatgttgaaataataataataacagcactgcattatctgtgacataaattgatttttgttctgggacttcatttgggagatttaggtatttctaggatgatctagaattggccagctccttcctctgaccttccatttagctggaacttcaaagcaaacatgaaccgtaatatcatggcacttcagaattttcctttcaaaatatatctctattgatgtgtcattctccattcttacctgtcctttgtttcagtggtacatcactgaaaaaaggaggagggtttcttaccctttcaaacgttgcaagcatgtgggttgggcatctaggctttggttggaaagtaagtaaaagttgaaatgaatcacttgattgattttcccatgtccacccctagaacctgcttctatagcccctctcaaataagcttgttgctttagtgactgtcttaattcatgattttaaattcaccccagcttatatcctgccagtccgtaaaaagtaaattacttcagagaagcaagaggccagagtttgaatagtaacatttctagcaccctgcctgctcctgtaatgttctgtttgtaggactctagccaaagctgtgtaacacacatgcccttaccttgcctagccccatcggtaaactctgaagtaattacttttaattaaacttcaggctgcttggaaaattagttgtacgaaaggaaagcaatgctatcctgaaagtgatagaattatccaaaaaaaagtcacgtgacactaaattaaacagtttgatttgacatcatctaagtatctggctcaagttcttttcatgtggtttttcccagaaatttgtaggccagattttcccagatttttgtgtaccataaaagtttcttgcaagatcctgttgaaagaacgattcagatcctgtggcttttaagcaacctccaagactctgcatttctgaaaataacccctagaacttctgcggctgccggtccgcttgccatttatgtaataaggatgggtttagcaggaagagaggctagggccagtgggaatcttcggaagggaatttccatgcataaggctgtgtttctggtgttgtaggcgaaggagatgcagcagatggtgaaattggaagccgagatggaccgcagaccagcaacagtagtatgaaactccagagtgcaaactgaagctggaagaccatgcaacaccagaagatcatgcccagcttccaaacacagactccacagacaaaagctgttttctttgtgtttcttttatgtatagacacggtgttacctgaaaccacatggactggggatgaccaaacgctcttatatttaacaatttgagtattgaatttctttggccaaccaaaagtagctatgtacacatacacacacacacatacacacacacacacacagagagagagagagagagagagagagagagagagagagagagaaatcccctattcctgacaggcagagttgaatcatgatatatgacttaaacatgtttgctatgagacagcatcacaagccagtgggcttggtgataacaactctgctttgtggtgcattaggacatgtttgagctgctgctgctgcaaaacaaaacaaaacaaaaaaattagtgcattagtaacttaatagtaagcgcatgcactagaagaaacacctctgtctccagttcattagcagaagtggccgtctgctatacaaatcacttcgcagaattttctacacctaagttacctcatcagtaagtgccatgtctttaccatgccataagatgctaaccttcctgtaaatgttgcagaaatcgttaggacaatagagacacaaaacggtgtatctgtgccaagctcatcaatgctcccagggggactcggcaggctcgtttcagaaagtttacagctgaccctgctttgtaggaattgcttctgccgattccacatattgcaattcactctacactataaggatcgtcaagtggttattggcaaatgtttgtaaatgtgaccatgtacaaagtatttatactccttaattctcacagttatagctcaaagtcatctaaatattaccacacgacaagactagtgagcaggaatcatagacgtaatgttttgcatgatgcacaagcaccaattatgactaacccattcaaacacagttaacctaacaccaaataaatactggttaagtaaatgtacggcacagaatattatttgactatcaagacttttagcataatgaaaaagtctatatatatgtgtatatgaattatgtgggcattcttgatacttcaagttctagtttgaaaaatacataactaatttaattttacacaaaaatatttatgcagattttcagactttcatatcaggaaataacctttttatgtctgttaaatatccaaacaatttgctaccgtgttaatctgcatggtcttctcgcctgctgtagttgccttgcaggtgtctcataaagtggaccgatgggatggagtcatgctgcccaaactcagaggagcatgcagggatccggtagcctagcaagagtcagattcctgattttagaatacaaaatgccaacttaattgttgtatatggttgtacaaatagattctgtaccttcctctgaagagggcagagaagattatgataccatgaaggctaaaattcaatgtacaacttctctaataaaaaatgaaaacacatgtaacatctaccagagtatttgcttccacgatgctttctagaaaacctttgcctcttcatgtatgttttcttcattattttcaaaaaggggctttatttcccatccccattgtggtttcccccaactgacacagaacacacagattctacatacagaagtcatgagctttttgtccctcatagttatgagttgaatagctcataatagctctgtaccctgtcaaattcctggctttcttctttgtaaaacagtagaatcaagactgcatatattcagcaccaacatcccatttgataaaaggccctcacattgggattgccggttttcaaaataaaattgttagactctcttcctcaaagccagtgctccttccaagagcctcaggctgctgtcattctgtcatctgccctgaagctaccactcaccacttgtctttgcttttcagaaggctcctagtttcccatttttctggtcatgtgatctctgggtctccctccttctataccatggtgaatagttatagtttgcagttttagattctgaaacagttttaatttatcccagattacttttttcttttttattggatattttctttatttacatttcaaatgttatcccctttcctggtttccctgcctcccagaaaccccctaccccatcctccctccccctgcttctatgagggtgttcctccacccacccacccactcccacctccccgggctcaattcccctacactggggcatctattgagccttcataggaccaaggacctctcctctgactgatgcctggcaaggctgtcctctgctacatatgcggttggagccatgtgtactccttggttgatggcttagtccctgggagttctgggggctctggttggttgacattgttgttcttcctatggggttgcagaccccttcaactccttcagtcctttctctaactcctctataggggacctcatgctcagttcaatggttgactgcgagcatcctcctctgtatttgtcaggctctggcagggcctctcaggagacagccatatcaggctcctttcagcatacacttcttggcatccacaatagtgtctgggtttggtaactgtatatgggatgaatccccaggtggggcagtctctggatggcctttccttccgtctctgctctacactttatctccatatttgctcctgcgaatattttgttctccaagaaggacggaagcacccacactttggccttccttcttcttgagcctcatgtggtctgtggagtatttgagacatatttacccataaaggatctactggaacaacattaaagtcaaaacatataaaataacagcaaaattatgacctttgctgtgtgctagagaggtggatcagcatccaaaagtgcttgctgtgtttataggtgaccagggcttgaattcccagcatctacgtccaggtggcttatgatcagctgtcattccagccccaggcgatctggtcccctcttccctctgtacacacccacccacatgtggcagacagtcagacagacacattgtttacaagtttatgcgccaaattctataattattaaagaaaaaaaaaccttgataattaaaatgactcattttcttatagcattagaacactgctgtgttttagggcatgttgctctagtgcccagtcctattcagagcactgtctcctctaggagttcctatggcctccttctctagttgatatctggctaagaaggaagctctttgttttctgctaagtgggaggagcttctggtcttccagacaatctgaagctctgtagagtgagcctttttacctaggtttttcaagatcactgccactgttctaatcgtggctgttcattttagcatttttctggtgcatacagatgtactggatcttggctgtgccaccttggattccaccatgacaccacctttgtctgggtgtctcgtatagttgttctaatacagtggagcctcacaaatccaggatccttgctgtcacctggagctaagtcccaagaaatgcaaagtgagcctggttatactaagccacagacttaccagagtttccgctgttatctggcttctgtatataggaattttgttttcagtttaggactccgaaaacttcacttgatttctttttagatatttatagatctcacagaataaagatatcctgccggtcaaattacatgccacccaatgatcactaccacatctcttgacttaagggatggtaaaatatgaagaatgtgtacatgggagaatttgtgaaacatagtatttcaaatgttttatgcacaatcttcaagccccaaggcttaaagggggctcaaattatagggtacaagagcatccttcagaaaacctacagaactgtctgcacctgggtctaacattcagcaatgagcttcctggaaagtaattgaaaacaggaaagaaatctataattgatcacttgttgagagatctgtttttccctccattctttcatccaatcgcatgccctcagttatgcttgtgaagtgtcttacacccttgtgaggagaccctctatctttcctccttagagatatcaagctttacacagacagtgttcacattgtgtgtaattaataaaaaatggagcccggttctccatctgttctccctatgtgtttgagcgatcctagccactgcttaacctggggcaatcttgttctgcttggcctcatcagcccccattcccagctgctgacacaactacaaattatatctccctgttctgagaagcatttttctctttccattaaacttctctgcttctttgacacccaggagtttgagcattcttacttgtaagcatacatttttttgcaacatacttttaataatggttccacctcccctctagcccaccacccagcagagatagtggaaaagttattaggctattggggcagtgtacctgttcatcagtagttctttggacgtgagcttgatcttaggcagcagttcagtcctgtagcaaacaccaaacacaattcagaagctacagaccagtcctctaggcagccaagcatcaggcagcttcaggccagccctttcagcaagtagacatcaggcatggaccagcaactctagttcatttctgaagaagtcaccaggattgccaatccgcctgaggcgaggctgcaaaagaagcaagctggtgcaggaacctaaagatcagttcttgggtgagtttcaatggcggtgttatcacaagttgaactcaacatcgctgtgtacggtgaaccaatacttgtgtgtccttagtaaagaataattcggcagagcaaaccaaaccaatgctgagttcacttcccactgtctgtgaggtcatatttatactccttcatcaagtgtcctttcacgtgtttgctatatccaaacatcctttcacctgtgtctgcttcgggaaaatgtctttcacgtgtttgctttagcaagacatccacatcctttgacgtgtgctccaactaaacatcatttgacgtaactaactttccaaagaactagaagtttccactttcacctattcaacttctgttcccttcaaatcccttccatatacacagaatagttttgccaaatgatggtcctaatcatatttccatgccatctgcacataaggaattcatatctaccagctaaagaataatatccactttattgaacacagtattacatttctagtctaaacttgtctactcacgtaacccatctcagcttatcattcattgttaacggaaggataacactcatcttttctagcccactacacagtattctatcctgacacaatctctccagccaggcagtggtagcacacacctatgatccccgtacttgggaagcagagggagatgggtctctgaatttggggtcaaccaggagtatcaagaaggaagcctcctcaaagttgcctttgattttcaaagaacaatgggctgttcaccattattggatgatttgaagtatttccagtaaggtgaaatttaggacttataattgtgtaacttcataagcaggaaatatcttcaaatacctgactgaaaaatactaaaataagctttttgcagaatatgttttcaattccaagaaaaaaacaaatacttcaaatccaatagtgccttttcaatgaagtccagaactgggtaagccattcagtgttggggtacaaacctgggacgtgcatcgatcatcagcaatgcaaaaaaataaaataaaatagtcaccatcataaaggccaccaggaacttaacaggtgagtctgtcaacattaggagcatgtgcagagtgaaggatagatgttcttattgttggtgttgttcaaggatacttcattttaaacctgaagcagcttttcctttgtactctcttctgcaactctgtatgaggaccacatttctttgaacttttccgtgatactcttgttttgaagaatcccaagcacactttaatagttgcacctttagtataaatctgaggttgaagcagctgataagaatatttatctttaatatttcatgaaaagcattctgttccatcagagtagtgaaaactattgataggaaggaacagaatgtaactttaaacagcagcaccattatttctgcacaaaaagaaacccgtatgcctgagccagtaaaagaggcaaggtccctttcacagtcctatctttttctgacttgcatgggaataagtgctggagctcagttcctgagatgctttatcttggacatattagactccgtcacaaggaaataacaataaaagtcagcaaacaagaatatatccaaggctcaaacgtctgtttgctaaacactagcttaccttatgttccaagaaatttctttcccaaagaaaggaatctgaatgttcgtcaaaacacatattatttattcttaatattaaaatagtggaaaccaagttacatcaaaaggggaccacatcaacatatgtggtttctttataattccaatggcagaaaatcttcgagtagcttagaacgggttccctcgtgtgacctggcctgatgggaatggagtgtagaagtggttctcagaatgtatgccaggcaccttgggtccatcctgtgcttccaagaacttgcataatgacatgggaacatctctagtttccaggtcacctctgtagatgatcagtgtgtgtgtgtgtacacatgtgtgcatgcattatgtgcatgtgtatgtatgtgtgtgtataaatgacatcacaacacattaaaaggaaatctttcagaatgtagatgactctatgaagctagacattaaaagacgtagaatgatataaacagtgccactctaccaatattttgatgtcatttttgcatttaaaattactattaacctatattattatattattatgtattaacctatattactatattaacctatattactatgtaacctatactagttaaatattagtatgtgataggttgagtgctagttgattggactggtaaatatttgaaaattactgttttaatttctaagagtagtatttacagacaaattcacacaaacaaaagctcatattccaggctagacagatggctcagtggttaagagcactggctgctcttccagaggtactgagttcaattcctggtaaccacatggtggctcacaaacatctgtcaagagttctgatgccctcttctgatgtgtctgaaggcagcaattatgttctcatatacataaaataaataaataattctcttttttaaatttttaatattttttattacatattttcctcaattacatttccaatgctatcacaaaagtcccccataccctcacccccccccacttccctacccacccattcctaattttttggccctggcgttcccctgtactggggcatataaagtttgtgtgtccaatgggcctctctttccagtgatggccgattaggccatcttttgatacatgtgcaggtagagtcaagagctccagggcactggttagttcataatgttgttccacctatagggttgctgatccctttagctccttgggtactttctctagctcctccattgagagccctgtgatccatccaatagctgactatgagcatccacttctgtgtttgctaggccccggcatagcctcacaagagatagctatatcagggtcctttcagcaaaatcttgctagtgtatgcaatggtgtcagcatttggaagctgattatggggtggatccctggatatggcagtctctagatggtccatcctttcgtcacagctccaaactttgtctctataactccttccatgggtgttttgttcccaattctaagaaggggcacagtgtccacactttggtcttcattcttcttgagtttcatgcgtttagcaaattgtatcttctatcttgggtatcctaagttttgagctaatatccacttatcagtgagtacatattgtgtgagttcctttgtgattgtgttacctcactcaggatgatgccctccaggtccatccatttgactaggaatttcataaattcattctttttaatagctgagtagtactccattgtgtaaatgtaccacattttctgtatccatttctctgttgaggggcatctgggttctttccagtttgtggctattataaataaggctgctatgaacatagtggaacatgtgtccttcttaccggttgggacatcttctggatatatgcccaggagaggtattgctggatcctctggtagtactatgtccaattttctgaggaaccgccagactgatttccagagtgattgtacaagcttgcaatcccaccaacaatggaggagtgttcctctttctccacatcctcgtcagcatctgctgtaacctgaatttttcatcttagccattctgactggtgtgaggtggaatctcagggttgttttgatttgcatttccctgatgattaaggatgttgaacattttttcaggtgcttctctgccattcggtattcctcaggtgagaattctttgttcagttctgagccccattttttaatggggttatttgattttctggaggccaccttcttgagttctttatatttattggatattagtcccctatctgatttaggataggtaaagatcctttcccaatctgttggtggtctttttgtcttattgacggtgtcttttgcctagcagaagctttgcagtttcatgaggtcccatttgtcaattctcgatcttacagcgcaagccattgctgttctattcaggaatttttcccctgtgcccatatcttcaaggcttttccccactttctcctctataagtttcagtgtctctggttttatgtgaagttccttgatccacttagatttgaccttagtacaaggagataggaatggatcaattcacattcttctacataacaaccagttgtgccagcaccatttgttgaaaatgctgtcttttttccactggatggttttagctcccttgtcgaagatcaagtaaccataggtgtgtgggttcatttatgggtcttcaattctattccattggtctacttctctgtcagtataccagtaccatgcagtttttatcacaattgctctgtagtaaagctttaggtcaggcatggtgattccaccagaggttcttttatccttgagaagagtttttgctatcctaggttttttgttattctagatgaatttgcagattgctctttctaattcgttgtagaattgagttggaattttgatggggattgcactgaatctgtagattgcttttggcaagatagccatttttacaatgttgatcctgccaatccatgagcatgggagatctttccatcttctgagatcttctttaatttctttcttcagagacttgaagtttttatcatacagatctttcacttccttagttagagtcacgccaagatatttgttattatttgtgactattgagaagggtgctgtttccctaatttctttctcagcctgtttattctttgtgtagagaaaggccattgacttgtttgaattaattttatatccagctacatcactgaagctgtttatcaggtttaggagttctctggtggaatttctagggtcacttatatatactatcatatcatctacaaaaagtgatattttgacttcctcttttccaatttgtatccccttgatctccttttgttgtctaattgctctggctaggacttcaagtacaatgttgaataggtatggagagagtggacagccttgtctagtccctgattttagtgtgattgcttcaagcttctcaccatttactttgatgttggctactggtttgctgtagattgcttttatcatgtttaggtatgggccttgaattcctgatctttccaagacttttatcatgaatgggtgttgcatcttgtcgaatgctttttccgcatctaacgagatgatcatgtggtttttgtttttgagtttgtttatataatggattacgttgatggatttctgtatattaaaccatccctgcatccctggaataaaacctacttggtcaggatggatgactgctttaatgtgttcttggattcggttagcgagaattttattgagtatttttgcatctatattcataagggaaattggtctgaagttctctatctttgttggatctttctgtggtttaggtatcagagtaattgtggcttcatagaatgagttgggtagagttccttctacttcttaaaaaacaaatttctgtaagcacatgaaggagtcccaaaaccaaagatttttaagaattgttgagctataatttggcttgatcaaaggttatgtgaacataaagcttatccaggtgtgcaattaagattcatgttcctccacagagcccccaatggaggagctagagaatgtacccaaggagctaaaggagtctgcaaccctataggaggaacaacaatatgaactaaccagtactccccagtgcttgtgtctctagttgcatatgtagcagaggatggcctagtcagccgtcaatgggaggagaggcccttggtcttgcaaagatcatatgccccagtacaggggaatgccagggctaggaagcagcagtgggtgggttggggagcagggcagggggagggtataggggactttcagaatagcatttgaaatgtaaatgaagaaaatatctaattaaaaaattcatgttcctcattatctgaacatagttcaaaactgtttgaaatatacaatggaaaaataggtatatatttatgacacaacataaattagggggaatagcacatcgtttattatacataaataaatacacattacctcaagatcattaggaattatgtcaaaataacaaaacttgaagccaaatgggaaccagcaaagaggcataattatctaagagttcggattaaaaaattaaatctttgttcctttatggagaggttagtccacatccctcttagaagaagtggaaaattctgtgttaagggatactgtgagtttaatattttctactctaagagttgcttttgctaataggatgtgttacaaaacagaaagaagaaaaaaaaaaaaaacagcctagaacactttcattgtttcccatgccatgtctccaagttagcaatggaaaatggtttgaaccaatccaagaaaaactaagagattggcagggaacaaaaaattacacacagaaaagaacagttacttgataaagatgacagctgtcatctaaagggaaactgagcagtaagcagactggacgtaagcagtccttaagagactgtgcagtaccaggaatagcagagaagaagcaggaaagcctgttgggtggacggaacagatggaatttctttcagagatcactgttgcattattaccattttgtaaaaaccatccccgcctctgtgtgtcgggggagggggaggagggtggcattacattatcaagattgctactggagtcaagcatgcttagtgtacatatcgattgcctgaatagccttgtgtctttcattctcttgtcttcttttattaattcagaaatatctgttcagagccttgcctttttaaagttgattgccatttttaggtgaatttcagatgttctttatacatttcaggttgcgtcctattttagatgtgtgatttaatttttttctcattttatagcatgcctacttcctactaattttttttttaatgttgtgtcttttaaaggacaaaagttttgctaaacatggtggttcatgcctttc

SEQ ID NO: 798 - DNA, 5087 bp, Mus musculus
tgcaggaaggacaagtgctagaatgttccctcatcaacagtattcgccaagcagccataccaaaggatcccaaaatcctggctgctctcgaagctgttggaaaatctgaaaatgatctggaagggcggatattgtgtgtctgcagcggcacggatctggtgaatatcggcttcacttacatggtggctgaaaatccagaagtaactaagcaatgggtagaaggcctgagatcgatcattcacaacttcagggcaaacaacgtcagtccgatgacatgcctcaagaaacactggatgaaactggcctttctgaccaacacaactggtaaaatcccagtgaggagtatcactagaaccttcgcatcagggaaaacagaaaaggtgatctttcaagccctcaaggaactaggtcttcccagtggaaagaatgatgaaattgaacctgctgcatttacttatgaaaagttctatgaactgacacaaaagatttgtcctcggacagatatagaagatctttttaaaaaaattatgagggttatagatctaaatggacttattttgtcatcacagcatcagcgagatcctcggctgaatgaaattttattcccattttatgatgctaaaagagcaatgcagatcattgaaatgtatgagcctgatgaagagctgaagaaaaaaggcctcatatccagtgatggattctgcagatatctgatgtcagatgaaaatgcccctgtcttcttagatcgcttagaactttaccaggagatggaccacccgctggctcattacttcatcagttcctcccacaacacctatctcactggccggcaatttggaggaaagtcttcagtggaaatgtacagacaagttctcctggctggttgcaggtgtgttgaacttgactgttgggatggaaaaggtgaagatcaggaaccgataataactcacggaaaagcaatgtgtacagacatcctttttaaggatgtaatccaggccatcaaggaaacggcgtttgtcacatcagaataccctgtcattctctccttcgaaaaccactgcagcaaatatcaacagtacaagatgtccaagtattgtgaagatctatttggggatctcctgttgaaacaagcacttgagtcgcatccacttgaaccaggaaggcccttgccgtctcctaatgacctcaaaagaaaaatactcatcaagaataagaggctgaagcctgaagttgaaaagaaacagcttgaagctttgaaaagcatgatggaagctggagagtcagccgccccagctagcatcttggaagacgacaatgaagaggaaatagaaagtgctgatcaagaggaagaagcccaccctgaatacaaatttggaaatgaactttctgccgatgactacagtcacaaggaagcggttgcaaacagcgtcaagaagggcctggtcaccgtagaggatgagcaagcatggatggcatcttataaatacgtaggtgctaccacgaacatccatccgtacttgtccacgatgatcaactatgcccagcccgtgaagtttcaaggtttccacgtggctgaagatttagcgatgcaattgaatcaaggaaaatttgagtataatggatcatgcgggtaccttctcaagccagatttcatgaggcggcctgatcggacatttgaccccttctctgaaacccctgtggacggggttattgcagccacgtgctcagtgcaggttatatcagggcagttcctctcagataagaagatcgggacatacgtggaagtcgatatgtacgggctgcccaccgacaccatacggaaagagttccgaacccgcatggttatgaacaatggactcaacccagtgtataatgaagaatcgtttgtgtttcgaaaggtgatcctgcctgacctagctgtcctgagaatcgcagtctacgatgacaacaacaagctaattggccagaggatccttcctttggatggtctccaagcaggctaccgacacatctccctgagaaacgagggaaacaaaccattatcactgccaacaattttctgcaatattgttcttaaaacatacgtgcctgatggatttggagatattgtggatgctttatccgatccaaagaaatttctttcaatcacagagaagagagcagaccaaatgagagcaatgggcattgaaactagtgacatagcagatgtgcccagtgacacttccaaaaatgacaagaaaggcaaggccaacccagccaaagcgaacgtgacccctcagagcagctctgagctcagaccaaccaccacagccgccctgggctctggccaggaagccaagaaaggtattgaacttatccctcaagtgaggatagaagatttaaagcaaatgaaggcttacttgaagcatttaaagaaacaacagaaggagttaaactctttaaagaagaaacatgcaaaggagcacagtaccatgcagaagttacactgcacacaagttgacaaaatcgtggcccagtatgacaaagagaagtcgactcatgagaaaatcctagagaaggcgatgaagaagaaggggggaagtaattgtcttgaaataaaaaaagaaacagaaattaaaattcagaccctgacaacggatcacaaatctaaggtcaaagagattgtggcccagcacacaaaggagtggtcagaaatgatcaacactcacagtgcggaggagcaggaaatccgggatctgcacctgagccagcagtgtgagctgctgagaaagctgctcatcaatgctcatgagcagcagacccagcagctgaaactctcccatgacagggaaagcaaggagatgagagcccatcaggctaagatttctatggaaaatagcaaggccatcagtcaagataaatctatcaagaacaaggcagaacgggaaaggcgagtcagggagttgaacagcagcaacactaagaagttcctagaagaaagaaagagactggcgatgaagcagtcaaaagaaatggatcagttgaaaaaagtccagctggagcacctagaattcctagagaaacagaacgagcagcttttgaaatcctgtcatgcagtgtcccaaacacaaggcgaaggagatgcagcagatggtgaaattggaagccgagatggaccgcagaccagcaacagtagtatgaaactccagagtgcaaactgaagctggaagaccatgcaacaccagaagatcatgcccagcttccaaacacagactccacagacaaaagctgttttctttgtgtttcttttatgtatagacacggtgttacctgaaaccacatggactggggatgaccaaacgctcttatatttaacaatttgagtattgaatttctttggccaaccaaaagtagctatgtacacatacacacacacacatacacacacacacacacagagagagagagagagagagagagagagagagagagagagagaaatcccctattcctgacaggcagagttgaatcatgatatatgacttaaacatgtttgctatgagacagcatcacaagccagtgggcttggtgataacaactctgctttgtggtgcattaggacatgtttgagctgctgctgctgcaaaacaaaacaaaacaaaaaaattagtgcattagtaacttaatagtaagcgcatgcactagaagaaacacctctgtctccagttcattagcagaagtggccgtctgctatacaaatcacttcgcagaattttctacacctaagttacctcatcagtaagtgccatgtctttaccatgccataagatgctaaccttcctgtaaatgttgcagaaatcgttaggacaatagagacacaaaacggtgtatctgtgccaagctcatcaatgctcccagggggactcggcaggctcgtttcagaaagtttacagctgaccctgctttgtaggaattgcttctgccgattccacatattgcaattcactctacactataaggatcgtcaagtggttattggcaaatgtttgtaaatgtgaccatgtacaaagtatttatactccttaattctcacagttatagctcaaagtcatctaaatattaccacacgacaagactagtgagcaggaatcatagacgtaatgttttgcatgatgcacaagcaccaattatgactaacccattcaaacacagttaacctaacaccaaataaatactggttaagtaaatgtacggcacagaatattatttgactatcaagacttttagcataatgaaaaagtctatatatatgtgtatatgaattatgtgggcattcttgatacttcaagttctagtttgaaaaatacataactaatttaattttacacaaaaatatttatgcagattttcagactttcatatcaggaaataacctttttatgtctgttaaatatccaaacaatttgctaccgtgttaatctgcatggtcttctcgcctgctgtagttgccttgcaggtgtctcataaagtggaccgatgggatggagtcatgctgcccaaactcagaggagcatgcagggatccggtagcctagcaagagtcagattcctgattttagaatacaaaatgccaacttaattgttgtatatggttgtacaaatagattctgtaccttcctctgaagagggcagagaagattatgataccatgaaggctaaaattcaatgtacaacttctctaataaaaaatgaaaacacatgtaacatctaccagagtatttgcttccacgatgctttctagaaaacctttgcctcttcatgtatgttttcttcattattttcaaaaaggggctttatttcccatccccattgtggtttcccccaactgacacagaacacacagattctacatacagaagtcatgagctttttgtccctcatagttatgagttgaatagctcataatagctctgtaccctgtcaaattcctggctttcttctttgtaaaacagtagaatcaagactgcatatattcagcaccaacatcccatttgataaaaggccctcacattgggattgccggttttcaaaataaaattgttagactct

SEQ ID NO: 799 - protein, 1057 aa, Mus musculus
QEGQVLECSLINSIRQAAIPKDPKILAALEAVGKSENDLEGRILCVCSGTDLVNIGFTYMVAENPEVTKQWVEGLRSIIHNFRANNVSPMTCLKKHWMKLAFLTNTTGKIPVRSITRTFASGKTEKVIFQALKELGLPSGKNDEIEPAAFTYEKFYELTQKICPRTDIEDLFKKIMRVIDLNGLILSSQHQRDPRLNEILFPFYDAKRAMQIIEMYEPDEELKKKGLISSDGFCRYLMSDENAPVFLDRLELYQEMDHPLAHYFISSSHNTYLTGRQFGGKSSVEMYRQVLLAGCRCVELDCWDGKGEDQEPIITHGKAMCTDILFKDVIQAIKETAFVTSEYPVILSFENHCSKYQQYKMSKYCEDLFGDLLLKQALESHPLEPGRPLPSPNDLKRKILIKNKRLKPEVEKKQLEALKSMMEAGESAAPASIDDNEEEIESADQEEEAHPEYKFGNELSADDYSHKEAVANSVKKGLVTVEDEQAWMASYKYVGATTNIHPYLSTMINYAQPVKFQGFHVAEDLAMQLNQGKFEYNGSCGYLLKPDFMRRPDRTFDPFSETPVDGVIAATCSVQVISGQFLSDKKIGTYVEVDMYGLPTDTIRKEFRTRMVMNNQPVYNEESFVFRKVILPDLAVLRIAVYDDNNKLIGQRILPLDGLQAGYRHLRNEGNKPLSLPTIFCNIVLKTYVPDGFGDIVDALSDPKKFLSITEKRADQMRAMGIETSDIADVPSDTSKNDKKGKANPAKANVTPQSSSELRPTTTAALGSGQEAKKGIELIPQVRIEDLKQMKAYLKHLKKQQKELNSLKKKHAKEHSTMQKLHCTQVDKIVAQYDKEKSTHEKIKAMKKKGGSNCLEIKKETEIKIQTLTTDHKSKVKEIVAQHTKEWSEMINTHSAEEQEIRDLHLSQQCELLRKLLINAHEQQTQQLKLSHDRESKEMRAHQAKISMENSKAISQDKSIKNKAERERRVRELNSSNTKKFLEERKRLAMKQSKEMDQLKKVQLEHLEFLEKQNEQLLKSCHAVSQTQGEGDAADGEIGSRDGPQTSNSSMKLQSAN

SEQ ID NO: 800 - DNA, 191584 bp, Homo sapiens
aggaactcagatgtcatttccaagggaattgctacaggcaaacaaccaacatccaaacaatcttttgaaacagctcagttattctcttaggaagttgttatacttcgttgtattctaatttctttgaaactgattattgcagattgaattaaattgccagggctcagaacacaatacctgaaaacatggcaccttgacatactgagtattttgagataaaggaaattgagaaaactgcagaagctggaaggtcaatctctgaccttctttcctgagacaccttcatgtgacaggtgtcccactttatgcctggagggaaggaatgataacacaaagataccaagaagaatgtgaagagacctttctcagttccccccagttcaagaccattatatcgtacccacttttgtctaatcatgcttctatatgactatccattctttatcaaaactaaacatagaaatatacgattatctcaatttctgtctttgtttctgaaggctcctgtgtcacataaaacttacattaaataaatttgtatgtctctcttgttaacctgtcttttgttatagagggtctcagacatgaactttgtgatggatgaggaaagatattactttttcttccctagaatatattgacagttattcattatatttaaattaagctggatctctaaatactccaggcaactaagcatattttagacatgttttgtaaaatcctgatagattgaaacctataacacgatcacaaatgtcatctaatacatttataaacctggatcttcaccccaggtaactaaacatattttagacatgttttttaaaatcttgatgtaatggaaccaatagcatgatcacaaatatcacctaataaatttataaaggcagtacactttaatatttttattcatctatttgtaattattaaattttaaggaagttacacttgcccctcaattatgattaatattgaggtacgagaggcagggacaaatagcgaatgcttgctttctgtttttattttattcctgtgcaatttgtgttcttttaatacactccaggaaattgtttttaatcatgtgatgctttataatagataaatcatagcaaaggccatagatttcttgtagcccagaattcattaaagtctaattccagtaccatcacaatcagttttttcccaaatataagtattgcagaggtttcagttaacgttcattttagtcagtatattaagtaactccttactaagtaatgaataaggatcagtcataactgggatgtgtgaaggctcccattgtacagggaaggttttaaattctgaaaggggagaacaacgttttacagctttatgtatttatctcttcctgttatttgttcttgccaggatttctgctagaaaacatagacattattttaagactaatttatatgaaaagaaacaagttttaaaattgtatcctccatttgctttagaaaatattttttctggaatataaaaattacagtcactatgaatattttaaaatacaggaaagtattaaagaaaagaaaattctaaaattacatcagctagctgtaactactatttgttttggtatatgtcttgctagtttttcccgttgtaaaacagtgtacatatgtaagcaatatgtgtataatatataacataaaaatttggatcagactcgtgtaattttatagcctgtggttattttttttcttaactgtatgttaagagcatttgtctttgcttcacaagagttgtgaatatttttagaaactcttctaaatttgctattgttaagcaaataactattcctttaaagtactatttttaatgggtacagtatttaagtactagagtgtgtttaatcaattgcttagtgatgattatataaggccaatatttttctaccataaacagcacaacagtattcttgtgcatagattttgtacacatttacataggataaatcctacttgtacaattactagataaaagagtatggatatttcaaggctatagaaatgtattacaaaattcttttttaccagatatgccctcaccccatccatcaacagcattgcatattatcatatttttcttcctgtactctttgtatgttttttgaaaaggttatttaatggcttaataaaaatggaggtatttttgcaaatggggaagttatccctaatgatacaatatattaatgtcaaattagattcttactggaggtaaagccatttatttaaaagccctggatgatctgatgacagcttgttgatatgtttttagaaatataaggatatcttatttaaagattgaagagcaaggcactgaaatatgtgtgatagattcaactgatttacttgtggtcagtggaaattttatcccaactctctatgttctggaaaacaactttggttgtgccatcatgaggtcacttaaggtcatgggttatttggtttaatgggatttgtatggttggatggggaagggattaatttgttatggaaatttttttgtcataaggttgaagttaaaagttgcacttaataaaatttataactgagtcatggtgcatttattcacttgaaagctatatgttatcaagtagaagcaaatgctttttcagatgaattcattttttcacaaataggaataaaaaatgaagaacaccttgtttggcttcgggggagctgcaggatttgaagtttgtatttattgctgagatgcaaaattgttacaagacatttggaacctggggaagagtatgcagaaataatgtcattagtcctcaaaggggctttggaacagaaggacaggaatgatctgaattcatttctaggtgaagtttattctgtacttttctctctgtcttcctctgatgattcagttgaacacacatgttgaatgaccattcccttcaaatcagagcagtctgtactgcattccaaacttatttggcaactttttagttcttttaagaaaggtgttcagcttcagggggcccaatatatgcattttctgggctactataaaaaattagcacaaactagtggctgaaagtaaccaaaatttattctgtcacagttctcgaggccagacgtctgacatcaaggtattttcagggccacatttcctccaggctgtggggaagaacccattcctggcctatttcaccttctggtggctgccaactcttcttgaactgtggctacatcactctaatctctgcctccgtagtcgcatttcctcctcctcttctgcttgtgtcaaaacttcccctgctccccttttgtaaggacatttagggcccacctggatgatccagaataatctccccatctcaagatctttcgcttaatctcatctgctaagtccctttttgccctgtaaggtaacattcgcgagttgcagcagttaggaggtgggtatcttttgggggccatttattcagcctgccatacccaggtaccttagatatgcctggtttcacatactgccctctgttcactctctaccagaacgtgaggcacatgtccagagacaaaaaattccttgtgaaagtattgacctaaactggtctaggttgggggtggtggtgagggagggtgagcagcactgactctaaagttgatccagcacatctgagataggtggtctggtaattcctgaagaccaccttataggtctagcaaggaagacaagacagcaggtttaaagactcaggacagagtaggccaagaaaaccaaatctcttccttggttcaccccaaccgaatggatagaaggccatatttatgggtaatgcacatgtcctacttgaatatttggcccctcgacagcccacctcagcccccttgtgttcctcctaactctgccagtttcttattatcatctttaggaggagcttttgccacttgctctggaacaagaccttctaggactccccttctttcttgtcccccgcttccaaagtttcttgcagtccagggagtttttcctctgccctagtgcaatagctaatccgatccagttgcacaaggatttagaacaatgcgactatttaaaagccttctggcctccttccagtaactgctcaatgtgtttacactgcaagaggtttcaggctgtctattctttgacaatgtaaagtctcttccacttcccgtgttcctcaaagagaaggtggatcctttcctgtgggctctgcatggtgagatgatgccattctaggaggtggaggagacaattaaaccttgaaatatcttgtaagtgaggccttggaaggcaagctagagaatttgagaagaggaacttttggcatggtacaatcaaagcctttttttttttcaagccagttagttggctgtgggttgggatttgagataattgcaataagaatgtagttatagggtggccagttcctcccctcttttaaaaagaagtaactgtccctttaacattctctgcagtcactgggactataatgtgtaccttcgtttgttcccattttaaatcaattatctggatcaaactgtagtgaaacaggattggctgggtcaacattttctagtctgtaggtcatcattgtaccatgtgtgtaaaataacccagctagtgcccctgatgccaggccctaggaagttttccacagatagcacaaagaacagcctcgaccacagccaccagtttcaaattgggaacactcaggatactccaacatcattttgccagaatacttcttaccttgttctgaaccccaatgctatgaaggaataagcaatgaaatgaactttcacctccactgcagaagagattaaggtcaaaattaccctcctccttcacctccaaagttcttcatatagtgagactattgtgatgaaattagtacccaaggtagagatgaatattttagtagttaagaatagtagtgaggtctgagaaacatcatatactgggtactcatgttgattctaggagaaccagagttaaaccaatggaagatatgcaaactgtaaaaagctttttttttttatttttatttttgatataaactttttgtatccaaagcctcttactgatttaaaatgaaaccaaagggatgaattaaaagggatggttgtcaggagtgagacaatcatagaacacataaaattctgcagaaaagagatgttttgcccaccattcttcacagcctggcaaactgggatggccaccatgttgttttttaatctatttttcaagctaacacttagctccctgtagttggttattaaggggggtctgtgggtctatttttctctgcagatctgttttatagcatagaaggcatgaatgcacatcatctacctcagaagcttgtttctaagcttcttgggtagaagctatgtggttatgtgtgtacatacatgctatattcaccaagctatgcaaaaggtttcaaagtcaaacttatttcttctgtgtaactgatagaaggctttgtatacttcgattatcaactccacattccccctaccctcagcctttggtaaccactgttctgctctctgcttttatgagttcaactgttatagattccacatgtaagtgagcacatggatatttgtctttctgtatttggcttatttcacttagcataatgttctccagttccatccatgttgtcacaaatgacagaatttcttcccttttttaaggctgaataatatttcactgtgtataatacaccacattttctctatgcattcatttgttgtgggatacttgggttgattccataacttggatattgtgaatagtgctgcattgaacatgggagtgcagatatctctttgacctactgatttcagatctttccagtaaatacccagaagtgggattgctggatcatttagttcctcaaaaaactaaaattccatttttagttttttgaggcacctccatactgtttttgacaatggctgtagtaatttaagccaaatgtattttaactttgaaagatatatactttttatttagcttttaaaatattctgattaaagttatatacaatattctcttagaatattcacattctcattctttaattatatcccacttttcattgtaaatgttgtgagtttgtgctgcagccacctcctcctcctcatcctcccttctgcccccacctaaatctccctctctctgtgtctctcactcttgctctaagtacttgccaaatatatatccaattcagaaaacaattaacttttgcttttactgatcattgttttactattttttttttttttggctacatattacatatctaggttttggtttgtaatgctctcatcttttctttctaaaaagtttataatttctgcttaactcaagaatgattaaggggtgtatgtatgtgtgtgtgggggggtgtgaatgtttaatttccatgtatatagatgttgtacactctctgtcattaatttatatgtttccttgttgttgtcaatgagcatgaccacaatattttctgccttttgaaaaatgctgaaatttcctctagggcctaatcgtgatcggattttgagattgtcacatgtgtgtgggtagccagggtgcaaagagggaaagaaaaaaaaatgtatttagagagagaataaatatattaagagagagaataaatatcattaagtactgttatttaaattgtgttactttgagttatttaagttgttgtactaaattattaagtatgatattcagatcttcgagattcttacttgtcttcttattctgttattctgagaatcattgtctcctgtttgtgactttgctaatttctccgtgtactttgtcaattttcaaatgttgtgatgctgcgtgctcacatgcttagatattaatggcagttaatgtgatgtattattactctgcctctgctttttctcttgaagtctgttttgtctcatgttgttgttacacctgttttctttttttcttagcacgtgcctatggtatcttttttcattcctgcgttttcttttttattttcttttttttttaattttagttctatcttttttttaattatactttaagttttagggtacatgtgcacaacgagcaggttagttacatatgtatacatgtgccatgttggtgtgctgcacccagtaactcgtcatttaacattaggtatctctccaaatgctatcccgcccccctccccccaacatccctgcattttcaaacttcttagatagttttcaaaatatttctgtaaacaaccataattttacctaatccgaaaacatcttttataagtgaatttaaccaattcgtatttactatgcttagtgatgtgtcattttattttgtgtttcctacttataatatgttcctgtcttctctccattctttatctggttactttttaaaagaggctcgagtttcttttgctatttctcccctgctaatcatttgggagttatgtttttttaattttaattttctataggagaactcttaaattcatagcacccatatttaaacttctattttcctactgatgtctagagtttttagtatctctgttcccttcccaaaatggttttacttccctttgtctcatactttgttcctccaaccacttcactggccacaactcatatattgatataatctaggatttgggttggctaatttttaaatatattttttcttttctacttttttggcatagtacaataaaacttaagattaagcctattgtttctttttactttatttttcttaacattatttcccatctctctcttatttctctatttattttcccctgacagagtatataatacattaaatttttcagagtagattactaaatctttctgattacttacaagtctgtaaataactacatttttctcctaaaagttgaaacagtattgaacacagaattttaaatccaaatttattttccacagaacttcaaaattgtcttactgcatttagtgttgtggatgatgtacctgatatcagcctcatcgtcatttacctctagcttatcttttctcttcctgcatctttgagagatttcatcatttctgcatattttgtgtcttcagtgtcaccatgaggtatatttgggggtgtatatctttttcccccatttatactacgtggaatcagtggattttttcactttgaggactcaaatattcaggtttcagaaacgttcttctactgttactttatttccatccctccattgtctccatataaggttggtaaacctttcctttctattttctatatctctaactttttcacccaggctggagtgcagtgatgcaatctttgttcactgcaatccccgtctcctgggttcaagcaattctccctgccttagcctcccgagtagctgggattacaggtgcctgccatcacatccagctaatttttgtattttttagtagagatggggtttcgccatgttggccaggctggtcttgaactcctgacctcaggtgatccaccccctccccccaccccggcctctcaaaatgctgggattacaggcgtgagccactgagcccggcgtggtgttgcatttttaagaatcccttggctcaacacttcatctgagttttctttacaattcagctcatctattaagttttatttcaacaatcttgttttaaatttctagtatctgtggttaattatattttaggaacagaatatactctctcttccctctgaaaaaatcagtatgctgaagtcaggtcctgtttttcctgctcaccctctttccttgggtgtaagttttacttgatgtgtttggtgttcttccatgttctttgcattgcttaactatttggtgactcattgttgtatgctcccctgtcatgcaagatgtttgggttgtagttattgcatacataccatggtgcatgttgccaacaaggatgggtaaaaggaacgctgagttcttcctagttgcagggagccactctgaacagtgcctagcctctctttaaatgtcctactcactgtctataataaaactgttgcaggacttttccttagttcagctaaaaacagggttctttgtcccacagccatgaaaattcaagctcacaggcaatttaaatggcgagtaagacagggtttcattgggtaaaaaggaagaaaatggggcaacagggactcttgcaagcccagaatccctgctagagggcttcattctaggccactggaatcccaagttccacacagaaggaggaggggccagactcctctctgctacaaacattgtgaacaccccgaggccccacctcagtgggcaggctggttggagtttctccagggaccccctatgagctggctgtctcaaaatcagaagttctcttgttccccacgtggcccaaggggtgaggaacaaaggggtaggggaaagggagcctaagagagggctaaagagaggaccaagagctataaaaaattctggctattcctacgtgattctgcaacttataccctgtgggctcctcctgcccatatgttcaccttcaagcccatagtgcccttagctatttacagcaggcctctcttatgtattgattttggtctacggtttccttattttatctggtgccttcagattttaaaaaaagaatatacacacacacacacacacacacacacacacacacacacacacacacacacatcttgttattttgtaggatttggagagggaatggaaacttcccaaatgatcacctctggtatttcttgattatgatatctccaggtttagagaaaagaaagcaagttgggggtcagacaaagggaagaagaaaaaaacgtattccacatatttaaagtaaatcttctgcaaacacagaaatgcgaagtgattaaccatcctcaattgttttttcattttatatactaacgagctattctttttcatttttaggtcttgaatataatcatggccaaaccttatgaatttaactggcagaaggaagttccctcctttttgcaagaaggaacagtttttgacagatacgaggaggtaaagaagtgttattaatcttttctctcaaaacattctaataattattaaattttaattacagtattgagtaaatattctttgacataagtaagaacatctttaggatttataggttggagttgttgaaaagaggcaagttatgagctagagtaataatgataatgatactataaatttttgagcgctcactatgtgccagatgaccttctaaacattttatgtgtattatttgtttaattttttacaacaaccttacaaggttgttgctattaatattctcagtttacagatgggttttatatagtaacagtttttgcttaatgcagtgcttttggcagtcattctacatttaactttgtatgtgttataaatgtaatagtgattgaactttgtgccagtcattgctttgctcatttcattgatataaaccattttgaccaaagctttgcatgcctctgattctatcatttattgtctgtgcccttgcaaggtggtgatgactccagactttctatagagcaggggctttgggccaccaatctgttcagaatggctgggtaggtgaattaaagcctcatttgcattgtaaatgcatgatttttcttctgttgtacttgaatttgaggtgacttgggaaggagtgtataatgaaattgatgtttcctttaccaagaagttgaaagtaaaacatattaaaacttcatttagagtcagagttggttcctttcaaaatcaatgaaatgtatgaagtggctaattcgctgatcttcccagaggtccagattgtcagatgcagaaactaggtcttctgtgagctgacatagcttaatacttgttgacttgatatttctgcagggtgcatctctagatttacaggatagtcactttttaagtaaacaaaattgcaaatgctaaggatggacctaaacatggttactattccttgtttgaattaaaatattgaagtaatagctgttcatatgtctgaaattaaaataacagtgaactgcattctgctataagatgaaacagaataatattctgccatccagagacaagcactgttaattcttatgcagttttcttctagtcttttttcatatttgtttttcttttttttctctctcccatggttgagatcatagagtaatatttttaaaatataaagcagatcccatttctcctgtgtttaaaatgcttccatcacttcccattgtagcgtaaagggaagttcacagaatgaaatacaaggccttctataatttggctcctgcttaattacctcaccttcatttctctccagtttccaacatacagcgtatgttcaactatagcaaaccacttacagtttcccccataaactattctactacatggtttgtttatgctactccctcttcctgaaatgtatttattccaactggtttgattggtgaactcctctcatctcagaacccagatgagaaatgtccacttctgtgatatcttccttgacccattgaatgaataagaggcgataacttattttttgccaccactaacctatccttgcatattttacactgccttcacattttatttaatgtttctttctctccaactatgttctgagtttcttgaagtcagggatcatattttacttatctttttctctccagggactagcagaatacctgtaaccaccaaattctttgtggatgtctagcatctaaaatgattttagatccagttgattccaattcagactaataattcagagaaggtaattttgaagagattacatgcaatcattggttcagtatatctcctactgttatgtaagaaaaagctattggagaaaaaagtacttgacaacagtgaaatgtgatttgatgaaccagagattcatttgaatccttcttattgcttgtgttttttttgattattaatcatcacagctcatattaggaaatactgatcacctgtgcttctaaaggcatttgcttttcctctggattcctctacaaactaggcaaagttagaagaaaagaacccttgaacaagtattaaataaaatgtaactaagctttcaactctttcaagtgctattttactaggattttgagcaaaaacattttaactttataaagcaaacatgcgtcttcatgataacataccaaaccacaaagctgaagaatatttcaagctggatgacagccagtttaaaaaataattatttcccactcctataagactcagttctttagagccagagccatgaaaacatttaaggcaacaacatgtaagcagaaaaggttcgtttctatggttggtacatgaacagccatgagggattacagctgaaagccagtgcgaggaataagattagagaaacaaaacccaagcatccctaaagtgtcatagcaaaggtaccttttgtgaaggggcataaatgctgtcagcaccatatgataactaacgttatcatcatgaactcaaatagcaggtaaacataaaattgtattccatgtatttgtttaaagaaagcagctgggcacagtgtcttatgcctgtaatcccagcactttgggaggccagggtgggcagatcagtaggtcaggagattgagaccattctggctaacacagtgaaaccccatttctactaaaaatataaaaaaaaatagccaggtgtggtggcacatgcctatagtcccagctacttgggaggctgaggcaggagaatcgcttgaacccaagaggcagagggtgcagtgagccaagatcacgcccccacacaccaacctgggtgacaaagtgatgctgtgtctcaaaaaataaaaaaaaataaataaaaaaagggagcagggagtaagcagtcagtaggtgggggaaaaatgtttaataggcactgttttaaaaatagtcaataaatgtagtaagtgcaaatgcatttaaagtttattttattatttctgcattactgaagaattatttttgaggcagccagatttttacaaatgacctaagtggtaggctgtgattgtattgccatgacacttctaattctgtacttttctaactttacttgacttacacgttacttaaatgcaaaatatattttgtttcctaagtgatgcttaacattaaatctttaaaagacagattcgtctcttgtggaggagagaaatagcagtgtttttaaaaatacatgcaacccagatatctctaactcaaccagccccctgactttcctataatatccacatcaaagatctgaagaacccattccctggcaggtcagggccttcccagtctttcctagaattcctaggtgcttacccacttttgatgatgacttatgtcctcaaatgcttggctaccattcagtttccaggactgttgactactccaatttgtttccttccctaaacccactttaacatcaaattccagaaatacaaggatgttgtataaagtagactttttactgaagatttagtggcagcagaggagaattgcatcatacaccacaccaagacaactttaagattaaaaatcggagatcatgctgaataagtttcattagccagcccaaccaggagtgtctctcttttttcttctttgtccctctcctccatcaagattcctgttcctgtttcctttattttattttaatcacactcagagtcctttttcacttttccagatacttttttcttaactgtcaaacattttctgtctctcaatctaaagaagaaaacttcaaaattcaagtccctcctcatcctggagctgtttggctcccctttcacctcaaactctcctactcagactctcctgagatcctcccttttgcataagcctgaaagtcaaagtatgtccttaaaacacacaaaatctaaaaagagctttattcttaagaaggagactgccatcatagataagtgttcaccaacagaactttccacaatgatagaaatggtctacatttgtgttgccgttatggcagccacatgtggctgttcagcatttgaaatgtggctactgggactgagggacttaagtttttaatcttacataatttaaattcaaattcatataggtacatgggcctagtggctttcttattggatggcatagataatcaactcaaactacaaccagattttaaaattccattctcccttcttgacactaagaagcattctcagtgcattccgttggaatctccagaattcatcagccagttcttcttaggggcagccagagcaggggttcaaatgttttatggatgactcacctcagccactgacctcgtctttcccacatcataaatcccagctcgggctaccccttcttcttgcccatgggactttcttgtatctgagtccagctgcctagatggagtcccttttcctagcaaagtcttggtcttcttggtctttatactagcctccccaccttccaccctacacacacacacacacacacacacacacacacacacacacgcacgcacgcactcacacacacatggtggaggaaaactgagacaattattgcaggtgtcaggatcaaaggagtatcaaagtgcagggtcaatacaaacctaaagtcaggcacagtgggacaggctgactttggcctctttccaaggtggttctgaaatcaaattgtgagcagccacaccatgaagctcagaaaagctcaagcagcctacaccccacaggctgttcatcagcaaagcaaagcgctttccaaatacaattttcaaaagacttaaaaacacaagcctcatataaagtattttgattaaaagatatatttaactaatcagggaggacattagcaggatgataaagctagttccaagagcacttgaggaagagaattttacgtaggaaaggaaaggaaaagtgaagtaagttttgtcaattagatacaaaactggctaatgtcctataaggcaataaaactctaacctattatagatttgcctttttctactggacacaagtcatctacatcattatagaataacagcagaaaaatgctatctattaaacttcgaagaatctatgtcccaaacaacagtaaatagtaggtcaaaccaaaaatacatttttctatagaagtaaatcattcttaggtatgcctcttcaatcatgctttgatgtaacaatgaaaagagggatggccatctttgcatattatttttaagcttgagataatttaaattcaattataaaacaatgtccagatatacctgtatttacactaaaagatacttacagtcatcaaaatgataataatcataataaattagtttttcaactgttataatcaacctattagtttttcaacttttataatcaacctaagggtagagaaaacatttaattatttttgaccaagcataacaaaaaagctgttacctttatctatttaaagtaagggtgccagacagatgctggaaattagaagggacttggagaaacagaggaaagtccagaggctttatactctcagcaagagggaaggttggtagttgatgtacaatagaggcttgcagatatgatttaaagtataaaagtagccaatcacaaaccaaaaataaaataatttcaaatttggagttgggggagaaaaagtagtgaaaatgcgttaagtggagttaaattgctgtgtttttattccaagaaaccgatttctgcatattcctggtggataattagtttagttactggctgtcttgccatgagtcctgttttcttaagctcctgtctctattagagttggacatatggaacagaaacctgttggtgccactttattatgcactgcagtaagtactggcttcatagtttggacggcagctgtactcaccgctataccaccaccaccactggctgggcttctcagttttaaactctaggctttcagcatgtggccctgaagccctttcactctcacccctccactttcttccacttgcatattgtgatgagaaaggtggtagaatgatctccttgtggtgtgagaggagaggaaggggcagcagggctgggggactggccccagaagcctcaatgaggaggcccgtttcaggctgagtcttgataggtgagtcagtcaaccactcaaagcacagctaagaggaagggagaggccagggcttctgcaagggcatgagtatgacagcacattctattgagggggtaaggggattattcagctagggcagagggtagggcagtggagtacaggggtgaaggcacagagatggccagtgtccacaccatcaatgggtttactttccagcccagggcattggcatttgattcagaaagctctagggaacctttgatggggtttcagcagggcagtgatcagttctggatgaccagtgacaagtggatgtggctggattccttgtgggagtggtctggagggtagtgttgggcttgaaggacttaatggacagtcagtcacacatatggagaaatacgggaggattttgagtgtaggaataaatgagaagatttttctaacctggtggatgtagagtatgtgagagaataagtgtagaatgaggttggaatttctagcacgggaactggacagctctgatgcaaggtggagagaatgccagagaagggggtacatgtatggatgcatttatattgtttctttctgaaatgacgaagaaccaaaagcaaaagtgatatcttctgtagtacctaagaagcattttgtatataatcacattaatactagttaaaaatacattgaatagaaagggaagaacgtaataaatgatccaagaggatgaacacatgggcgcatcttcctctctcagtcctcttctctcagggtgattgttgctgcctgatgggatgaaggaatgaggaccccaagaccctcacagccacaggcttccttcactcaccctcttatgtgggtgatactgcattcctcagggtagaggaattttttttttttttttgagacggaatttcgtgcttgttacccaagctggagtgcaatggcacaatctcggctcactgcaacctccgcctcctgggttcaagcaattctcctgcctcagcctcccaagtatctgggattacaagcatgtgccaccatgcccggctaacttttgtatttttagtagagatgtggtgaaaccccgtctacataaacagaaagtctatttacacagaaaggtttgaggaaaaagaacctctgacagaatattctgaattataattaggggtaagatcgtaaatgtgtatacttatatgagtctttcacacactctgtatattgtatgtgaattatcatattggaatcattaggctacaacaagctatatagcaacttaatgatgataaacaatcttgagtacagttggccctttaacaattcggaaatattttaaagacattacaacttaatccatggtgcgaaccactgctctagaaggctgagataaagcaatgaacaagacaaacaaagtctcagtcctttgggagtgtatggtccagcggcaggagaccaacaataaaccaataagcatagaaatgaatggcttccagcagtgttcaatactcttatgttactaaaaggagtgatagagggatcagagagacaggcagacattgaggagtaggggaggggacattgctgtgggttgggtggtcagggcaggccctattcaggaggtggcatttgaagttgtagctgaatgataagaagtagctagattggccaggtgcggtggctcacacctataatcccagcactttggtaggctgaggcgggcacatcacctgagatcaggagttcgagaccagcctggtcaacatggcaaaatcccatctctactaaaaatataaaaattagccaggcatggtggtgcgcgcctgtagtcccagcaactcaggaggctaaggcacaaaaatcgcttgaacctggaaggcagaggttgcggtgagctgaaattgcaccactacactccagcactccagcctgggtgacagagcgagattctgtctaaaaaaaaattaaaaaaaaagagccagtttggccaagaactaagggaaaagcattccaagacatggaaacagcaaatgctaggctctgaggcaaacatagtcttggcatgtcgaaagaagagcaccaagggtggagtgagcatcatggtcagggcatggtaagaggagaattctgagaagcaggcagaagcccctcatgtggagcagtagttctctcaaagtgtggtccccaagccagcatcatcagcaccacccagaaccttattagagatgcgcattctcaggcccatcccacggacctatggaatcagaaactccaggaactggcccaggcgtatgtgcattaacaagcccttcaaggaagtccggtgcacacttaagtacgagaataaatggtgtagaaccaggccgaggtgtttggatttcgttctgattgctatgggaagccattttcaacagggactggcatgatctgatttatattttggagacagttactctggaggccgtacaaaggatgattcgtaggcgggggccaaaaggttggagaagaccaggactttaaggaaggtgagctagaggcttaatccttccttttcctgactatgtctccatgggcgattttcttaatatctctgtgccagaaaaataggatatgttaaggtggatgggtcgaagaatatcagttgttctccttaggattctacgagtctgcacacacttttcttgtcagcacagctgtgtgacttcttcctgatgtgagaagaaagccaaggccaggcatctgagcaccacctcagttggcccgaacactgaaacaacccaaagcagcaaaaactaagatcagccagatttttgcaaagaaaaacccaaaacaacattcaggcctgttccttcctctagaccagcctttgaaataacagtgctgataatattatctggtctctcatgctcccaaagctcagagctcattgtcatccaagcatgagacctttaaggaaaggtctgtattgtaggtcatctcatgctgaaaagtcatagaactgggtcagcatactttttctgtaagggaccacatattaaatagtttagattttatgagtcctgcagcctctgttacagctattcaactttgtcattgtagcccaatagcagccatagaacataatatgtaaaaaaatgagcaggcacttggattagaagacaaacaatgccacatagaaatgagtaacaaattggttttgatggtaatggtagtaatgaaataattctagtttcaagtaattatttttactcctcgtgttcttttactactgtgttgtatttttaatttagtcaccctctatttctcttccttatcttgatagatcattgtatcagtttatcaccttttgctgcatacataacagactgctcacctttcttttctaagatgctctcatttttgtggggtagggcaggggcttgctcttctcattttcatgtctcttccctctctgaagtttctttgggcttgcttttatttcttcacaaaagtagaagataactctatttcctggaggaatggaagcatctcccccatgaaatagtgtctcagtcagtttcatggaaaatggtaatccttgagatccatgcttcaaggatgcaagaaggacgtcttattcatggaaaaatgtgagatgcatccattaggaaactagacagggaaatctggggtcccactagatttacaaggagcttgtggaaacaacacaagacaggaagaaagtatggaaaaaatatgggcaattaaattaaaatataagtgtaagcacctaggggttcttgctgccagctgcacaaagaaagaacatggcattgtagtaaagaaagagtttgggcaggcgtggtggctcacgcctgtaatcccaacactttgggaggcaaagatgggcagatcacttgaggtcaggagttggagaccggcctggccaacatggtgaaaccctgcctttactaaaaatacaaaaattagctgggcttggttgcaggcacctgtaatcccagctgaaaatacaaaaattagctgggcttggttgcaggcacctgtaatcccagctgctcgggaggctgaagcagaagaatcacttgaaccctgggacacagattgcagtgagcccagattgcgctattgcactccagcctgggtgacagtgacagagtaagattctgtctcaaaaaaaaaataaataaaaataaaagagtttaatagagacaaggccagccacaccacttgagagatgagttagtattcaagtcatcttgtccaaagctgctagtttaggggttttttaaaggcagtttgagggaagaggaggtgcggggtctaggcttctgctgattggatggggcagggatgaaatcatgctgaatcgcttctgggtggggccataggagtggggttggcaagtccaggtgggtccaggtggagacatgggtgtgaggcatgcaaaaaaaacctgaaaagatatctcaaaaggccagtcttagtttctacaatggcaatgttatttgcagaagtaactggggacattgcatgtcttctaacatccagaataatggctgacagtcatatatgtctgcaccttagcaggactcaggccctcctctcaaacagaagtggttggtttttgggcaatgcctgttatcatttaaactgtagcctaaacatctcccaaagttaccttcatccaaaagcccaggaataattaaggaaaaggcaaggtgggaggtgggttagcttagctaactgttataatttttctcactgatacaatttttgcaaaggcagtttcataaggaactagctgaggatctacttaggtctctcaagtactactgtactatgctaaagaattaaacacaatggctaaaattacagtgctgattctctattgcttcttctcaacctgcagtataaagagaaaaatgctcaatattagctacctcaagccgtgtctgtgggccgcaggtgaacaggagggtgttggccagggcatccttttaattagggttgatgagtgcagtcttgcagatcatcaggctagtggtgaagagaccctaaggacatcctggtttcattctctttgcacacctctttggaattgcactctcttaatgcatgtggtgtagccattgaattaacagagttcattcaagtgtggacaaatgaacagtcagatgaaatatacagcacatgttaaaatgaattcttttttctgttgagcagtctagggagaagaaatttttttaaaaaatcaagttaataattttgaagtcccttctcgattgataaaattgcacttctttaaacctgtgcaatttcatgccactgaattccctattcctgaaaattttcagaaattatttttgtcattacttgttttggttgtttttgagagggtgctgtattagtgagggttctccagagaaacagagccaatgggatatatagagatatataggtaggaagagatttattatgaaggattggcttacacaattatgaaggctgagaaatcttatatcgtctgtctataagctagaggcctaggaaaacgagtagggcagttccagttcaaacctgaagggccagagaaccaggggagccaatggtgtgtaagtgtcagttgagtccaaaggccccagaaccaggggcatcagtatccaagttgaatgtcccagatcaagacagagtgaattcattcttcctccaccattttgttcagttcaagccctccgtggattggatggtgccctcctgtattcggcagatcttctttattcattccatcaattcaaacacaaatctcttccagaaacagcctcacagacacacccggaagtaatatttcatcagccatcagccttagcccagtcaagttgacatataaaattaatcatgacaggtgttttttagcacagacagtagtaaatcactactactttgagcactcactaggtgctggaccttgcacttgacaaatggtataaatgatcaggaaagtatcctgatctagaccctaagagagaggattcttggatctcgcccaagaaagaattagaggtgagtgcacagagtaaagtgaaagcaagtttattaagaaagtaaagaaacagaagaatcgctattccataaacagagcagccctgacagatgctggttagctatttttatggttatttcttgatcatatgctaaacaagtggtggattattcatgagttttccaggaaaggggaagtaattcctggaactgagggttcctcccctttttagactatatagggtaacttccggacattgccgtggcatttgtaaactgtcaaggcagtggtaagaatgtcttttagcatgctaatgcattcatatgaacatataatgagcagtgaagacaaccagaggtcactttcttctagccatcctagttttggcagcttttggccggcttccttagtgcatcctgttttatcagtggggtctttgtaacctgtgtcttgtgctgacctcctctctcatcctgtaactaagaatgcctaacctcctgggaatgtagcctagtaggtctcagcctcgttttacccagccctgttcaagatggagtggttctggctccagtgcctctgatttaagcattatttcacttaagcctcgaaacaaccctgttttaagtaggtctttttagcttccttttgcagtttacaaaactgaggattaaaatggttaagcatgttgcttgaggtttcacaggctggttacagacttagcagaaaaatggcctgccagctagcctacagtggatctccaagtatggtttcagacagcatcagcaacatttgtgagcttgctagaaatgcagattattaggccccaccccagacctacagaatcagaaactctggggggagggtccagcaatctgtgttttaagagccctctcagtgattctgatgatgcagctcaagtttgagaacctaggcctagggaaaggtaaggaattgtagacttactagaaggaaacaaaattagatccatttaaagttctttacagctaatcttcctcaaacaggcaacacagagaaaagggtgaagactgttgaataaaagagacttctttatctaggctgaacatattagatttattgaacccttgacacagtgcaaagtacttgacatcagtcatctctttaaaccctcaggtggtggtgagggctaaatgagattttccacagtttacagatgaggaaagagaagcttaggtcacttaagaattgcttgttaatcaacatgtagtacgtgatggagctagcgtccagaactaatgtattgctaaagagaacatacacaggtcacacagctttatgacccagaatggctgtcagcagagaaacatgtttttgaagatatatatgatgtataaaatacataattaaaaagtctttctaaagttcattaataggctggaaccaaagacctgtttaactttttactcaccgtttgcattacttattctagaccataagtattatactactaagtctaggtgtctttagtctagttctcttagggaaatgagaatgggaagactgtatttttcatataatttcccccacattccccaaggaaagtgtttaccagggcttttttaggttttttgttttttgtttttttgagacagacggagtctcactgtgttaccaggctagagtgccgtggcatgctctgggctcactgaaacctctgccccccaagttcaagcgattcttctgcctcagcctcccaagtacctgggactacaggtgcgcaccaccatgcccagctaatttttgtatttttagtagagacggggtttcatcatgttggccaggctggtctcgaacttttgacctcatgatctgcctgcctcagcctcccaaagtgctggtattacaggcgtgagagccactatgcctggcctttcttttttttctttttctttttttttttttgatacaggacctcactctgtcacctaggctggagtgcaatggcacaatcatagcttactgcaacctctaactcctgggcttaagcaattctcctgcctcagcctccctcccgagtagctgagattacaggcagagccaccacacccaggtaattttttttttttttttttttttgtagagacagggtctcactatgttgaccaggcaggtcttgaactactgggctcaagtgagcctcctgctttggtctcccagagtactgggattataggcatgagccactgtgcctggcccctagtctttaatttttgaggggggagaaaaactaggtaaaacatactatatggaaagattataatattttctttcaattgatggacatagacataaaatattgtcagcgagaaagcctatctttttaatatttattttgataaactaacaaggagcatataatttataaaatactttctcttaaagccataaatagtaagcacttgctccgaaatgctgctttgtcaagaacgttaattgaagcagatgagcagagtcagtatagcttcccaggtccagcctgcattccctttctactgcagagttacgctgaggacagcatgctggcacctccacggctcttctgctgtcaacttttcttctcccaagtacctgaaagggcaggtgatcctcttaactttgtagacatgtgaaaaggagactagtttttgaatgctcaccaaaagccaagttgccaggatattgtttgcaaatacagaaagggtttttgtactaagtggtatttaaggcaaaatctttgccaaagaactctatccaaaagcttgaaatacacatagttggttaagggaatgcatttggagttaaacagaaataggttcagttttggctttgctactcaagagatgtgaccatgagtcagtcttaacacccaccaagcactaagccagagcttccttgtttgaaaaatgggagtgataatacctacctcgcattgccatcataaggaataagtaagatggattttttaaaaatggaagtcagattatgcccttcttttggtttaaacctttaatgggtttctacctcattccaagtaatttccaaagttctttctgtgtcctgcaagtcccctacatgacctaccatttcgctgtcccattgatattccctgagcattctaggcacactctgacctcagggcctttacacttgctgttctccctctggactactctcctctgtacagtcctcatggttcacttcctcacttcattctgtttctgctaaaatatcacattctccaagaggccttcttactcacctacacacacaggctcctgacccttctggatgttttatttgttacatttatcactacctgataacttactcttttttgttcattgctgaagtccttctagaagataagccctgagagtagactttgtttcctgctgtatccccaccagggaattaattcatcactcaacatatttcataagtacctactatgatccagcaattccttagttacttatctgagactgaaattcattgatatttccatggttcctaatttttaaggaattttaaagccccaaagaactggaactgaaaatgtcactttggaatgtggagaaaggttaagccagagacactatctgtggcagctatggaggtgtgtcgcttaaatctcccttcaagagacagctgccccaggagtcccctcattggacagttttgctgcaggggcttcagcaccctcaaaatgtccctgcccaggctgtactgaacatggcaagctgctacaaccgggcctttcctgcccaagtgaggctcctctggtgggcgttctgtgctctgcagctgcaatccagcaatgttctcagctgtactgcaagctgagacaattcctccccagttctccctgctccctcctctcctctctcaggtgtttgttctgaggtctggtttggaggctctccctgtcactcggtttctctcccctttctctttcacaggcatttgccctaatgaattgctcacatttccaattctgtcttgcctgtaatctcagctactcaggagggaggctgaggcaggagaattgcttaagcccaggagttagaggttgcagtaagctatgattgtgccattgcactccagcctaggtgatagagtgaggtcctgtctcaaaaaaaaaaaaagaaagaaatttaaaaaagaaaggccaggcatagtggctctcacgcctggccaacatggtgaaaccctgtctctactaaaaatacaaaaattagctgggcatggtggcatgcacctgtagtcccaggtacttgggaggctgagggaggagaatcgcttgaactcgggaggcagaggttgcagtgagcccagatcatgccacagcactccagcctggtgacacagtgagactccgtctgtctcaaaaacaacaacaacaacaacaacaaatcctaaaaaagccctggtaaatactttccttggggaatgtgggggaaataatatgaaaaatacaatcttcccattctcatttccctaagaaatgtcttgggggtttgtttctagatggagaagcccttccctcagggtaagaggtcctcaggataagcctccaggactctgctgccatttcctgaggccgactctgagctcactgcagaattctctaggtggtagcagtggttcttgtgtgatgttccagtaattgctgcacttattttagacacaataaaaagtgacagagccagcattgaccctaagagccagtggggactatgtatcttcaaggcctaaatataagctatttcagaagacaaaagtccaactggagtgacgtatcatgcagctcttgtggaaaaaaaaaagcattttcaaaagctgcattatttaaatgagaaatgcatatatttaaagggaagttccataaaagtcatttgagattccttttctttcaatgactgtattcagcattgtctattatctccatatatcaatagtttaaaatattttttcatagacctgccttttcagaaacatcttctatgtcactgtatttttaattacttgctcagtgtaatttattatgctggaactaattgtgttttaattagaaatgctttgctaaagagaagaacttatcagtttgcggcggtgtttccggtgcaactacaaagcacgtctcctgtttttcttaggatttttttataaggggacagccacataatgtgtttttaatatttgttgtaaatatttattaagaatcctgtttacttgcctccataactctaagttgttcctctttaatttttccttattttagttgctaaggcaactgttttgactactgtgacagttttcctgcccaagaaagttactttgagtgaccacccactcctcttgaaaacacattttgctttctccttccttctgcactctgagaggtagttgttgaatattttaggaataatttcttcacctcttttctggcaagagtcagggaaccctcccagaatctgagcatccagattttgcctcacaatcctcacagcagagacacttcagggagggaaaattacaaacctagacagatccggagtgttcagccattcaaactggcctgcctcacaaatcaagtcccaaagatttaacatctatatcgtcaagtaaaagataaagtgggaatccctagctattagtgaccataaagtcaatcgttagaaacagtttggcctctcccaggtggctaatctgggcatttcatttctcccccagattcaatcatagttaagctgattaaattctcaaagaaccaaggatatttctgagaccttgtatctaagttctttcaggctgctataacaaaataccatacactcggcagctataaacaacacatttatccctcacacttctggaggctgcgatgcttaacatcaaggtgctggtagattcggtgtctgataagagcccatttcccgattccaagatgacacgttcttgctgtgtcttcacacggtgggtgaaaggggcagccgtctctctggattcttttataagggcactaatcccatttatctcccaaaggcccccacttcctaattccatcacatttgggattaggatttcagcataggaatttttggtggggtagagcacaaacattcagaccataggaccttggtaagcaccatcaggccaaattttattttattttttaaatatataatatgagagatcagaaaagatggtgtaccttcctttgtttcttttcaatagccttcatccactcttccaagccaggtcacttagaaagttgatgatgttctttattcctgaggtaagaataaaatgaaaggggtggattaaatctttctacttgacaccagaataagcgttctctgtatctcactgtcattgctggaatgagcactttaaatgctcatggttgattactgagggagagacgttttcatttttgttcctattggttttgaaatgaaagatagacagcaggtttaccaccttttgaagttgctgaataactcacttcattgccctcttgtcatctgagaacgtgctctgtcgtgtcagggaggtgcagggcagagtctccccaaccaggaatgacctcttctgttcactataccccaacatgcacttgaaaataaaaactgtgttgtgatggctcgtctgtggcagcagcttcttggcctgattgtagactgaggccagcttaggcagagtgggatggaggagttggagcaggaacaaacagaagatgaccttctgtgcagaaaccacattttcaacaagtctaagtcaacccagagttacgaactctgggtttcccttatgcttagctttgtattctagctcactggaaatagacatgcactaataccattgctctttttaaagatctgtgtaacagaaatggattccctgtcaaaatgtatttgtatttctgcctcatattatatattatctgcatcctcttgggtgacttgcctcacctcagttaggaaaagttttctcatctgtaaggtagggatggtggtgtttacctcatttgtctttgatggttaataataatcagtactagcaacattataatgattattattactatgttttatattaataatcaatactgggccaggtgcagtggctcatgcttatgatcccagtgctttgggaggctgaggcaggaggactgcttgaagccaggagttcgagttcagcctggacaacatagcgaaactctgtctctacaaaaaaaaatttttttttttaattagccagccatgatagtgaatgcctgtagtcctagctactcatgaggctgaggcaggaggattgcttgagcgcaggagtttgaggctgcggtgctatgattgtaccaggagtttgaagctggagtactatgattgtaccactgcactccagcccggatgacagcaaaattctgtctcttaaaaaaaaatcaatactggccgggtgtggtggctcacgcctgtagtctcagcactttgggtggccgaggtgggtggatcacgaggtcaggagattgagaccatcctggctaacacagacaaaccccatctctactaaaaatacaaaaaattagccagacgtggtggtgggcgcctgtagtcccagctactcgggaggctgaggcaggagtatggcgtgaacccagaaggcagaggttgcagtgagctgggatcatgcccctgcactccagcctgggtgacagagcgagactccatctcgaaaaaaaaataataataaaacaaaattaaaaaatcaatactaatttacttagttcagactatgtgtcaagtgctctaatgcccagaaataacctgtgagataggtattgtggttgatgttgttgtctctgtttttagagatgaagaaatgaatatctaaccacatttggatcaggttcatctaaaaccctaaagcctatgtaaaatacccaattgtttctgctgctggtgagttggtttttatgcttacatgtttctctcaccttccacaggaagctgtaatgtgaaatatgtaccaccagataaaataacggaagagggatttagattgaagggaaaaaagtaaacaagggagagtacatcaaatgaggggtaaatttagcaggcagcaactcaacaagcagcgaaaatgatctgtaaagttgaaagaggtgagcctcagatttgcttctggtgttcctggtggctaaagcaatgtagaaaacacaagttgttgtagggttcacagtgtccattagattgtaaggaaagcaacaggtcagtaggaacagagtttttcctggtcctaggatctgaaaaaaaattcttacagaattcttacaaaatacactcccccataaaaaactgtaataagtacagaatgtttcagtagtacagttgttcagttatctatgtggtaggattcacggggaatccataagaaatgcagtaattaaaaccaaaacacttcagaaacccatctgatcctttgtgatgattgctggcatcagtggcaaggagaatagcagaggcttcttcaggtatgactgctgagcagttacctgagccgactgctgagcagttacctgagcccactcctgaacactgtcagtctttcatgtgtcagcctcaaagcaggtgtagcatattgttcaaaacatttgatctgcatgcctcaatgtcctcacttgtaaaataggtataaatagtgaagcagcgttgtttgtctggggtaatacccgaggttcgttgtcccacagccatggaaagctaggacgtggacacatcagagtgaggttaagagtggaagtttaatagacaaaagaaagagaagagctctctgcacagaaagggctcctggagaaaatgggttgccacttccgcagtgaaatgcagaaagtttaataaatgaacttaaggagggggtatgtgatttacacaggggatgaaagatcggttggaggaggcatgccatttgcaagtgtgcaaagaagctggccactccaccctaatcttttattatgcagatggttattctagctggctggtgccatgttgcctcgtccttattgtacacgtggtgacaaagaaaagggaagatggagcctccgtgttgaacatacctggcttccaggtagccttctcttggcgcagctgccagcattcacctgtacaagcttccagcttgtttatctatgtctgtagctcggtttttcaggctgctctttgttagaaaagaaatgatttgggggctacttttattaaaagggaagccttgccgaagactccttgtactgacactatctgcctaataatttctttctagctcctatatcaataataaaaatggtacctccctcataggaatgttgggaggataataagttaatgtagagaaagtacttagagcgttgcctggctcttaggaagcactgtgtatgttacctagcaatagtaggcatattactaggtgccacaggccttttgaattgctcatcaggagactagaacggcatctccctgttggattccagctgagcatcagttactggtggaagggggaaaggtctatatttaacaacttaacccaataggaacatctgtccaaagaatcaaaggccatcaaaaggaatgcaggagctacacatgctgttattttgtctgacagattttttcacaaggtaatacttgtagcacatagcaagggtctgtgatggagcagctacagccgtgccctctggctcctcatgtggaatgtgagctgagaggcccagtgtcctttatctcctgggatcttaaagcagataggagaggcacaaatggaatgaacattctatatccttccaagcaagagaccaagctcatgagggtaaaagcaacttaataaggacccatgcccatctattacatcagtccataaatcattctgatggcaggatgttatcactgagggctttagtttaacttgaaaaaaataaaaatttgtggttctgagagaggcggtgtttgtgcagaatcacaaaggatctgctaggtatgaagcttaaagcatttccctggaataaggagaggaaataaataagccataaagcatctcttgggctctgagctttcaggatctgatagaaagctagacctcttggttaattccaaaccagactccacctgctttcccagtctgaaggccacacccatcattctccctggtttatgaggtctctttggtggtagtcacgcataatgtgatttaaattgaatgagatcctttatggcctcttcctcagactcctctttgtttctctccaaccttgacaaggtctttttaacttcctctccattcttatcaaaccaggaagcaaggagggtgagtctcatatgtacctagtggagtctacctaggcagtgttcgtttattgaccgtccaacaatcttctggcgataggcagaggggccctgcttggtcaagtttgcccaagtcagacaggcatgggctttggaatcagagaagctggcttgaatttcaggtttgttactatttgactgtggctttgaataatttagtctcctctgaacctttttccccccttctctctgaaaccgcattggccaatatggtaaccactaaccacattgtggctgtttaaatgaaaaattaattaaaataaaaaattcagcacttggttgcattacccacatttcaagtgctccctgtggctcatggtgaacgtattgggcagaacccatctggcacatttccatcatcacggtaaatccgttggacaatgttgatctagtctaaaaccttgcagagttatcatgagatttatgtgagatagtatttgtgaaatacctcacaacaagagccctaaaattgtagctattttctcataagtacgaccatttagtcagcatttactttgtcccaggtacttagacattctcaatattaattctttgaaagccctgtgagtcggtatcagttttcccagtttacagctaggaaaagtgaaatatggcaaggttaagcagaataactgcaagattctccagcagttgcctggtgaggaggctgacatgcaaacccaggaaccaaccactacaaggcctggatctcaaaaccactgtggactgccacctcttctgaaggttttctttcccagaaaacgcagttttgtgatggaatgtgaatgcctactccatttcacatttctctacgtcctaatgtatctgtccagtgacaaacacagaaaagcccctggccaactcatgtttaaataaggtagagttaaagcttttatgatctggtccaaaatagctgtccctagctggtaataagacttgactatgccctatttgaagatgccaactccacagtataagatacagacatttgcagttaacttaggaagtgatggcgagagagagggcaagagagaaagggtaagaaataactacaactcacaattaaaataaaatcagctaccacttagctgtatccccatccaaggaatttctccacttcaatcagagtatttggcctgctgaactctctgacattccttatgaggggattaaactttattgaacagaatcactttaaaaattgaaataaaggaaaaatgtttaatgttagttgatttgaaagtaacttgaatctttgaaaaataggttgtgatattgattaatgttgaaacagcatgtgtgagggaaaatatactaaaaataacacacaagtgaaaaacatactctatctttgataagagagggaagtgtctctgtaagcctgtagtggcacaaacccctcagagtggggatctctgagccagaaatagcttctagcaatggtgatctccagcaaaagtgattctagactctcaaacagaatgccctctggcctctgcttaagtagtttcacaaaaggtgttcctgtccctttctagccttgctctctagtggcctaagagttgggctggatgagctaacgtgtccttgagctctaaggcgtgactgatgaattttaactaatatgagaattaaaattctgcccaccccccaaggaagttctcttatggtttgtttctttaccagaaaattctgttaccatttaactgcaaaacaaatagattcccaaaggagaaacattccagctttcttttatgatctcccctgcagggcccagatctggaggaggatttttctgacaatgggacttcacaatagcctggcctcaatctggtcagggagccatagcccactttcaggtcaggagggattcatgtgaaatttaaaactgctgttagggaaaaaagaatagacatgatgtgtctttactcaccagagggtagggttattatgtttgttagtaggaggtggtgagaaaccaaattagattgtgttttagttcctttcagctgattacctctcatccctcagatttgctctgtgaattttcatgggtggtttgaagcatttggtccaagaacctttcagccacagttgatgagctgattgtgggttttgtcgtgagcctggtctttagtgtcagctgggtttcattctaagatccccctggagaatttctattctgataattgcttctcttaacaactgatacgtttttattttatgagctggatgggcacctggtaaatattttttttcccttttttgcttttgttgctggggagcccagagccaagttgctatcctgctataactgtgtaggaccttatgacaggcatttcagagagctgccttttactctggccttagtttactattccactttatttttcttctctttgcccagatttctcatcctattttgaaaatgatttcttcacagtgtcaaacagtgctcctggttcaataggaattcccaggacgtgcctcaaagtcacccccaacctcgaagatgagtttgtatgcattacaaaaagggactcctgcctttaggcagacggcctcaaccagtgcccttgtaattgcacttctatccttggcagtcttccaaggacttccttgttgggttctgggcctgatgcagccccctcaatttgagcaacttcttgtttatttgttttacatattggcctgctgcaaaatcttttatttaaaaaaattcattttttcatttatttttaagttaatttgttagttttatggtgcttttgatgtgctaggtgctagaacacaaaggtaaacaagactgcttcaaggactctgccctcttggaggttgttgcattctggtgtgggagtcagtcagtaaatcaaggatcagggagagcctctctgaggaggggataatgaagacaaggtctgtagaatgaagaggagcctgatgcaccaagggcagtagaaagagacttctgagcaagaggaactgcaagtgcaaaggccctgatgctagagagagcttgaggggttgcaggaaaagagtttttatggttgtgaacaagaaatagaaggaagaacagagagtggcatgagataaaatttgaaggatcccagatcgttcaggaccttttcggccaggtaaggagttgggattttatcctaaatatgataggaatccattgaatggttttaataaattcattcaaagtttaaagaatcaatctggctcctatgggcagcagaaaaagcagaagtgagaagatcaatccatgggagagataatattggtttgggccaaggtgggtggtgatggagagggagtaaagtgggtgtgtattcgaaatattatagaagaagacttgctactgaaagtgagaggaaaagatgagggaaaattaaggatgactcttagtttcaataagtgaccagatgctagtgacatttatggaactaaggaagtactgtgatggagaaacttggaggggagagaataaagagttcagttatggacatacttatttcaagacatcctagtggagatgtcaaatagcaaatatttgaactcacagaggagaggatggggctgctcttacaaatttgagggtcatcaggaaatagatgatattgtagacacaagattgaatgaaatctaggaacacagtggaaatgagaattcccagaaccaagtcctgaggactatgtaaaagttgagtacagaaggaaaaggcgggaaattagactaaggtaatggagcacaaccaggattggagagtgtttcaagaaggaaggaataatcaaactctcagagatcaactcaggtgaggaaaggaaggtgtgcactcctattttgcagcatgctggactggccagagaagttttagagggtgatagaaatggaagccagatagagttgctcagatggtatgaagagaggtaatggaaacagtgaatatttctaagatattatgtcctgaagaggatcagggacatggggtagtaagtggggtagtaagtaaccattgagaaggaaatataagattaaacgtcactgttgactatccatttgaggtttataatcttgaatttaaactaaagccagacagttccattttgtgattttcaccaccaagtttggtgataaagtatgcataaaatagacttcgttttttggccaagaaaacactaaatgagacatggaagttgcgaaccacctgtgagggagtgattgcaatattgggctgctttggaaataagctagataaggatggaagtaaaaggaggagggaactggtgcgtagtgagagattggcagggataatcaaaagggatatttgactttgcaaagaagtcaaatataggaggggagaactgtagagctaggggctagaaggaccagatggaattccaagagtgagatattaggaattgaaatgtccaggtggtaatggcaagctctaggggtactcaggggggaaggaagaaaagaattttgtatttaaggaggccaaggaagtgaaagttcactctcaaaataagttggaaacccattcttatttattatttgtatttcatgaatcatctcaaatccttacttggaattaggtgatagggtgcacataagaatgatagtggctgattctttgtggatctactctgtaaacaccattttacgatgtacttttgtacactgtgtaccaaaattcttcattgccgtcaggatattcattgggatatatttggaaatgggctaattcttatgtcttgattagttgataattctcatttttttagtcagtaacaacataagacccgccatggccttttgggtaatagctaatgcttttcaggtggcacggaagacccttgcaatgaaacaactcttctatacatgtcccatcacaccccctgtcattctcttgaagtgctctagccacacaaacaaatttctaatgtgaggtcaatagctgctcactctgcctggcatgaagattcatctaaagtatcaacttctgggttaagccttttctaaaaggttgaactgtccaaaaatgccattttgaagggtcaaaaaatgtcatatactggcactttcatattgttaataatttgctaccactattacaagtctgaaccatgcattgttggtagagctattacttgctgaattggaattctgtgttatgtgctttatgttcaccatctcatttaattccagcaataaacccaaaaggtaggtggaactacttccacttgttagacaaggattctgaaatttagaaagggtctttctgggagagagtacataacaaatggtggaactgggttttaactcctaaagcaaaaattataccatgccctttcctttggtcttattcatggcaatgacagcagtacagagcacacgcctgatacagagttggaatacataaatacatacagtaatacttcatctgccagaaaactacccaaattgaaggctgctttgttcagggacccctaggactactttatgatggcctagtatcttggcattggatttaccttgataaatgttgttgttcccctgtaatttagaaagataaattttaacaggtgaaactaagagtctgaacggcccttaaaaccttaatcctgtaattactatttatttgttttaaggcactgccttgatccatgtttgccagacaggttcctaattgctggcattgaaatgatctaggaagccagtttcttcagctcatgaaaagaacatgtagatttgttgaagtgtgaatgctaagtattggtgtaatgcagtcagagggcacaggacatctatgttcatttcccaaatgccctttttctttcattcacatggatttttcctctcattcctaagcacagtggtgctctaataagacaagaagtcagttggcaagtgtaacacagatgctctgatgccttgaatttggctaatattgcttcttcattcaaacgtcattctgtagctttccctgagtttctggtgtcaaaattcaaagcaatggttgtcaaactttcgtgtgtgttcgaatcttctagagggcttgttggaacacagattgctgggtcacatccccccagactctgactcagtccatctggactggggcctcatattctgcaattcagtaaagctcccagctgatgttgatgctgctggtctagtgactacactttagctctaggggctgttcaagatgcgctttacaggacaccaaatgaggttagataaaaaagcaaaaatctcagcaaatatctgaatgctagattttacagacaaaaaaaaaaaagaaaaaaaacacaaaacaaaaaccagtgacttaaaaaataatgtatctcctgatttttgacatcagtgggctagaacttgggaatccttcttccaagatattaaggaaactttcttctctatgactttcatgctttcagtcagtatgctttgttcttaaacctatcctagagcaagatgttttattaaattgatcagttttacaatacaaaattgaaagcaaagagttttcaaaatgaaaacattccataatacaataagaattgtggatattacatacaaaagagtgatttctaatttgtttagaagctcagcaatattttcatttttattagattcaaaatggtgtgagtcatgaagatcaacacatttctttttgacaggaatcctttgtgtttgaacccaactgcctcttcaaagtggatgagtttggcttctttctgacatggagaagtgaaggcaaggtatggcccaagaagagcaagttgttctttctgctttgtggtttaagccattttgtttctcaacaagtagactgagtgctgttgatgaaccctacccttattcattcattcaagatttttaaaaatgtgcctacatgtgccaggcattgaagtatacagtgatgattaaggacattatcctcatagattccagtctaggagcaatgtcaggcattaaaaaataagttacaagtcattgaatgttgtgaaagagaacactggattgtcaaagagcttaatttaatcttgggagttagaaagaaatctgccagaagaagagatgctcaagctgaaatctaaaaggtacattaaaagtgtgttcatctcattataccctgggacttaattcgatgtatggtacagtgtccacatttaatgaacaattgagctgaatttaagaaaagaattaaagttatataaaaattagcatttttctcacatttcatgtacacacatgtatttaatgattattaacaatgttttatatataaaagtaacagattttagaaacatttttatattcagcattgcacatatatatgtctatatgtatgtatatatatatatgtgaaatggaatacttggggtcttgattatttctgattatttacaataattattgttacatggttttaattccctcttcaagctgactgtaatcagcactgccttcatcatcagaaatttttgccaagcagtttgcctgtatcataggtatggcataatttaagctcattgctgtgttgtattctctctcttcaggaaggacaggtgctagaatgctccctcatcaacagtattcggtcgggagccataccaaaggtacctgtgattggtatttgcttttctaaacacggatttacttatattggaaatggccatggcttctagagataaaaaactcactctttgtatccaggctacttaaaacatttgatctcagttttgagaatagcatgtggttgctggttgtggtaatgtcacatttattcacatgaaacctctgtgactctcctctggtgagagagaggctttgtggacaagcagaccctaataaaaggctcttctatccaattgccatattccaggtcctccaataactacaatcaaaactctaaacaaagaccctcatatctagtttctaaatcaaaaatttaggccagacacagtggctcacacctcccagcactgtgggaggcagagggaggcagatcccttgagcccaggagtttgagaccagcctgggcaacatagtgcaaccctgtctctacaaaaattacaaaaattagggtgtgttagcatgtgcctgtagtctcaactactcaggaggctgcggtgggaggatccattgagcctgggaggcagatgttgcagtgagctgagaatgcaccactgttcaccagcctgggtgacagagcagagactctgtacctcccccaaccaaaaaatttgtaatacctttcttatcagttgatttcaaggaatatatagtgttacaaatttcacctctacaggttttagaataatgctaggtgtctgggcccttatgtttatttttacattaaatgtggtttctttttaccacgtttcttcctccatgctctgtgatgtaacttatttttttttctatctgtgtacctctatacaggatcccaaaatcttggctgctcttgaagctgttggaaaatcagaaaatgatctggaagggcggatagtttgtgtctgcagtggcacagatctagtgaacattagttttacctacatggtggctgaaaatccagaagtaactaaggtagcttcagttaaatggcctccttctcttccccaccatgtatatatgttgtgtgtttaattttatgcgtgctatatttttatatacttaaattgtatggtaatttaaaagttagcattgctttgctgacatgtttctgtagaaaatcagcaattaaaatacccttttagcatgtcactcctgtgggccaacaacccaaatacctactacgatatgttgtagggatactagtccagcacttctccaacttgagtgtataccagaatcccctgagctcttgttaaaatgcagattctgattcaataggtctgaggtggggacaagattctccttttctaacaagctcccaggtggcatggatactactcatctgacaactacagtttgagtgacaaaggtctagatcagtaccacccagtagaaatgcaatgtgagccacatatataatttaaattgttcttgtagctgggttttaaaagtaaaaagatacaggtaaaattaattttaataaaatattttatttaacccagtagacctaaaatattgtcattttaataggagatcaatataaaatttattagtgacatattttacattcttttgctcatactaagtcttagaaatctgatgtgtattttcaaatcagactaaccacattttaggtgttcagtagctgcatatggctaatggccaccatactgggtgggcagtacgggtctggatggttaagaaatccaaaccccccctcccaataagttattaaaatattgggttaagatcagtcttttaataccatatccagcataccattgccctggcaagtgagtctcaaagagacttctcgaagaagtagaaagcctcgtaaatattttgtctgctaatcatgtgtttacagggtgattttacctctgtacagagctcccattatctttctgtaatgtgtgtgaaaaggactaagccttcactttccatggcagaaacatgggtttgggggaatggggaggcattttgtcttctcattaaccctataattggaaactcagtgtaggttgaatgagagagggttccaacaagtggaaactcagtgtaggttgaatttctaatatcattagaaatattgaattttagagctaacaggaaatgtacagggaagatcatttgaggacactgagattacaaaacttaaccatgaatccaggataacttatggcagaattgagttctgttgacccctaaaccatccaagctccattaccctcactcacaaagtatggtcctcattccagaagtacagacccctcctgggagcttgttacacatttgagtctcaggcccacccagatgttctgatcctgaatcttcatttttgacaagatgctccaggtgactcggatgtgtggtgaagtttgagaactcctgttttgtagctctggaggcagaaatggatgctcgatgtcacataagagtgtttggttctgtccttattgtggtggttttatgctatcgttcaggtcacctcactttgggagaacagattttgcagtgccttcaagttcttttattactcttctgagatcaactccttctctaattaccaattcatattacaagaaacaggatgatgcagtatgagctcaagtattggggctttggggccacattgcctgggttcaaatccttgctcgtccccttcccagctatgtgaagcagatatacgctggacctctctgtgcctcattttcttcatctgtaaaatgggaacagtactagaatatctgctcttaggatgattgtgaggcttacatgagttatgacgtgggaagcactttgtgtactgcctttcttattgaaagcccttaatatgtgttagctattaggatgacagaggccaagaattttagagttcgaaatggaccttaggaagggcttctcacctcatttttcagatgagaaaaatgaagctagagaggtaaaggaactctgagaccacacagcaagctgggccagagtccaacctaaaaccaggtcttctcatgccctatatgctgcacccactttgctctgtgccctgagcaaatacagtcctggggagatggctcaaatcagtaaatcccataatgtttttgctttccataatttgattgctgttagtcttggcccattctaagaaccacgttctgaaacatacccttgagtagattatggatgtgtactgttggcccttgaacaatgtgggggttagagctaccatacccctgtgcagtcgaaaatccatgtataacttttgactcccccaaaacttaatagcctactgttaactgaaagacttatgataatattaacagtcaattcacatactttttgtatggtatatgtattacctattgtattcttacaataaagtaagctagagaaaaagcaaatgttaataagaaaatcataaggaagaaaaaatatattattcatgaattgaaagtggatcatcataaaagtctttatcctcatcatcctcacgttgagtaagcagaggaggaagaagaggaagaggttggtcttggtgtctcaggggtggcagaggtggaggaggtggaagtggagtcaggagaggcaggcacattggtgtaacttttactgaaaaaaaatccatgtataagtgggcccacatagttcaaacccatgttgttccatgaccagtgatatatgtttgagggttgggggtggggggatgtatacttcaagggaagatttgaaggttttctcctagtattattgccattgaaatttaagagcagctagccagttaagaactaaaaaataattctgtattggattttttattcaaactcaatactatttgagcctgctcttactgaagaaactaagtgtttcagcttctgggaactattacatcgaatttcattaatagcataatatataaataaatataaatctcattgtccaaactggacagtgcattgtcctttcggttgattgacactggagaaaatattgagtacatttttccaccaaatatacctgcatgtggatactcttgcccccttccttatctcaaaacttaaaataaccatatttaccaccttcagcattgacaacattttctccatcaccaccgttttatttctattcctctatatgtgtttctattcctaatagaacacacaagccatcaaagtgaaagtctttatatgaaatacacatagatataattacctcagttcgaaatgatggcaggatacataaatcaaattgggccaatgagaaatgtagagatttcccagggtacatgaaatagtgtttgtgactcactgagtggttctactcaaacgtgagtatagcctaggagcctagaatcagggggccatgaaatatactaacagccctcttacttagcccatgcaatgagaaggtgcatttttggtcagtttatcacaaaagtcaattcgagcaagtaatcattttttaaaattaattcatatataccttaaacactgtaacttaaggcatataaatgttgttctattgttgactaatcttttaatgttagggacaagccttttcattaattgtggatctgttgcgtggcttttatgttttgggtttttttttttttttccccctgtactttactctgaatgcctcagatagccagtttggtttctttaaggtggatctgagactaaggacactcattgggcagagtgcaatggaatgcaaaatcctacagttctgtgacttttttccctaatcttttagttatcttgtctacatggaatttgagaaaaatatttttggcaacttgcctttaaagaaatcttcccaaaatattcagctagagaaacaacaatgccctttctttccacaagatcgtgtcattggtttacgcaatttttatgacaactgacaataaataggtttgaaaacaaaagtaacccatggtagacatgtaaggtgagagtaaaagagtacaaaatattggaaagtggcttgctggctgggagagtccagcactccctgggcaatctgtgtattttgtttgtcttataaacacctgatgagtcttggtctgacaagtgaaatgtaagttaagtgagtttctagtacagaacttgcttatgagtatcctatgagattcatgagtctttttttttttaattcctaggctcttattacacttaagatctgaccatttggaataattcacttaacccaacatttaatctaggcaaaagggtaaactttgaacttagtgtcttttataccaaggaccatgttccatgtggaggaagctttcctgactttcagcaagccattttcccttctgtattcttctacttctcaaagagggtctctgatagtttttttttcatattcaagtgggtgctttaagagtcaataaaatattatctgaaacctgagtttctcagggttgaattttaaataaatacaaaatactttccagtgcatatgactctgaaaatatgattgtgcttttttcagtaaaagataacagcattgttaagagacaccttggtagctcaccttgtcttttcttcagcttctctctctgctttgagagtaaatacgtttgtgttgccactcttacctatttaggagatttgtgctcagttctatatacctttctcctctaccggtaagtcccaaatcaaagctttcaactcttctcacctgcttctcccacagtcattttcatctcaacaaatgtgctctcagttgcagagaccattctcagttgcagagaccatgaacaccttcctcttgtgtcctatgttagtctgttcacaaatactgtttgctctaccctcagcaggtatccagaatccagctgctcctcaccaacgtcatcacgacacagtggcccaggccaatggtccaggccaatatcatttcttccctattgtgccccaagaggtatctaactggtctcttttccttagccttgcccattttggtctagtctaaaaacagcagctggagggatgtttttaaaatgtaattcagatcacatcactccactgctcagaaccctccaaggccctgctagatatcatccccacctcccttcccctttctaccttaatctctctctttcctcctacgcattttcttccagcctctgggacttggcatttgctgttccttctgtctgtatcgtgctctttcccagttacacacagagctttctcccccacagccctcacgtgtctgctggaaaattgtcttagcaggagctccccatttcaccagccttcggcacttcctcactccttttcctgctctgtgtttcttcttagcacgacttacttaccataatatccatttattcatttattttcttcctctgtctgcaggacggcactgttctgttcactgctgtatctgcaacatctagaactgtcagtgcccgacacttagtgagtgctcaataaaaacctattctattgaggtatttatgttgactaaatgaattccaacccaagtgataaaggtgtataaaccttaatgttgtgcaactcaagtttgtacagttcagttgttagaacagacaggaagatgatcctttgacaacaagactgagaaaatgtgattcaatgatagtctaaaggaaagacagaactctgggatcccgtgtgttatttttagagccacatttcaggatgtaatagcgctgctgctaagaatccatgacgagactggaggttttgaccctggtgtcctggcctctttccagtttggatcattatgtcctgcttacctaaatccttcctgtcgttacagttagagaatttagctttcatttcctctcctaaacaactgcctgttaaaaagaattactaacaaattgctgtcatatttaccccaaacctagtacacctttcgctaataggcgagtcttatacatcataaagcttaaaacagttaagaataaatgcagcctactaaaaaaaaacaaaaacaaaaaatttacccagtgtgatggcagatgcctgtaatcccagctacaccagaggctgagtcaggagaactgcttgaacccaggaggtggaggttgcagtgagccgagattgcaccactgcactccagcctgggcgacaagagtgaaactccatctcaaaaaaagaataaatacagccaaatgaaggtattttcccatttttttctaaactgaaataaagctcttttttttttcctggaatcattctcatctttttgctcactgttttacaaggcactatagaaataattgaatatgagcattctaataagttaatttcattagaaaagcaactttagttcctctcatgttttcttttgttttttcctcgctcagaatacaactagcttggaaggattttggtgtctagcaaagttgaaggcagttcagatgtctttcattaataagttacagctggcactgcacagcaaactgaaatcacagtcactagacgtaagatggaaatgcaggcctcattcaacatctccataaataaatctgttattctataccaagttgaattttcctttgattacaaaaaataagctgttattatgacgttcaaaatgcaaatattgggattgagtttagaccagactgctcattatactttatgcaggtttgtaaatatttggcaaacttcataaattatgccttgtaatcaagtcatcaaataagcatgtaaataactactatagaaattaaattacaaaaatattatgtattcttttgtgtacaaaaagataaagtcaggttatttgttaccagtaataaaatattattttaacaaattgggctgaaagtcaaaattgctttgctaaacttgaattgtgttgagtgaaagacttactgcaatggttccagaagaaggaatttattctttgtttcactaaaaaaaaaattgattctctatttaaattgagtcctcctggctttgctaacatcctgcaaagcctccaagccctgcaaccagttcctctactgatatttaaccacagcattaccccaagggatcagaggcttcagcctcgtctggggacttcttagaaatgctattgcatttcttaaaattcagttttaattatactgtataggccagtggctctcaatacctgagaacttattagagatgcagattcccaggccctgccccaccctactgaatcagaaagctaggatttcagcggccttccaagtgattcttatgcacactcaagttagagaatcactgctaagcagaaaagctcaatcactaacatttatatcctgctttacttgcagaggccttaaagaacttacattaacttagtggtctgatgcccaggctcaactgagctgatgcctgctgaatactaaagcagctaaattgtaaatctgaactgcctattgatcacccaaaccccagtatactaattaataaaagcttcttcaccacattgcttcaacagtttttgaggctcaaatgtgggatgagtgtgtaggtctctgtgttaatttttgttttgttttgggtttctttaacgtttccaagactgaaagttgacattttcttgttaattgtttttcttgaagctcttctgagttcattggaaacaaatcaatgagggggggcattaagctgtccggagtgcagagctgtgaatcagaacaaataattgagtgcatattcttaagtttaaatgtcccatcccacctaagagttttctttttgccaaataaggataatgggttttattgttatttctattgctgggttgagtttacggaccaccagtctctgccttacatgggctgtggtcatcagagaatctgtggagctggtgaaatcagtctcctggggcctcccatgaccacctttttcctctgtggctccttcttccttgcctgccagttctcatttgctcttgcaagaccatctctcctagcagctgctacctcagtgtctcatccgtgatggcgctctctgaactctgaattatttatttgtgcatcaccaaaagtgatagttcctttagaccagattttgtgaactcagatgcctgtgggagccagggaaatgatgtgaatagctgaaaacatgtcaggcaaagacaaatacgggagggtgtggactttagcaagttggagtgcacatacgctgttgaggggggcactttcacttatttccagctagttttccaactaccaaaacatgggcctgaggtttctagattgttttcatgtccatttaatactaacgtggattttttacatgaaatctcttgatattaaaatgttggcaactcattttttaaacattgtgcaaaatgacaaacatgtctgtggatcatttagaaccatagctatagacatcaggcaccatgtagcattaacacacttgcactaaagtgaatgctaatattgacttattgtgttcaccttattggcattttaaatgaaagatacctgtttgttcctttatttcttcattcagctattcatccaggaatatttttttgatgaaacctgaacttggacaaatcatttcaattatattaatctttttaatcctcatttgttaaagaaaggaattgcaccatgtgtcctttgaagtcactttctcttataagacttaaggaaggactggctgggcatggtggctcacacctgtaatcccagcagtttgggaggctgaggcaggtggatcatgaggtcaagagatcgagaccatcctggctaacatggtgaaaccctgtctctactaaatacaaaaattagccaggcgtggtggcccatgcctgtagttccagctactcaggagactgaggcaggagaatcgcttgaacccaagaggtggaggttgtagtgagccaagatcacgccactgcactccagcgtggcaacagagtgagactccatctcaaaaacaaaacaaacaaacaaaaaaacttaaggaagcactctctttgcaaaataaagtgtaccaggagccaaggatggtccaggttagttgctttgacaggacacttgtgtacacatggaaatccctagataagcttaacctggactacatcatcatgacaccaggagtcagctactaggataggaggctttgtggttggagaggtgacagaagtcattctgggtacttcctgtggacattaaaggttgagagatcctgagatagaatgcaagaaaatcagttgttctcggcttcaatcagttacacaagaaggaaagatctgagaaacattcagtgtggaatccagaggttttgttcctgggtaaagttagagaagctaaaatagagaccagattctgattctgattaactgggagtacgatgatacagctaatcagaaattgagggtctggttactttggatcagggagaaaaaggaacaatgaatttgtttaaatttttttctctgaggaacctgttagttgcatgacctgctatgggtgatgcaataggacagagatcatatactacttaggatccttaggggcttgtccatggggcgagctctgttctgtctctgtggcacatctctaggcctctgaaatcctgaaaaggtctacgtttgtttgtttgtttgtttgtttttgaaactccctactttcataaggaattaagtgtggatttttagctggcatttttcttagtgctggacttacttaaaagctcctggtcaaaatgattcttcaggaacatgcagctgaagctagaggatatttgctgttgttttcggggaattttgtcacctgtatcagtgaagttatttctttggatgagagtatcaaagatgaaagaggcctcaagcctccgcttagctcccaggttctctgcagctgcactgaccatgttgacaaggtcatttaaacatttgcatggacagtgtgtttttatactgttgactggtatttcctgaatgctaaaggaatgttgctcatgatagaggatgtagttgcatgacattctatgcagaaagtacaggatagtaaaaaaaaaaaaagaaaagaaaagaaaaagaaactaaaaatcccctagagtgtatttccccttctgtgtcttttcttaattcaagtgaaatttatgtaacataaaattaaccattttaaagtgaacaattcagtgccatttagtacattcaccatgttgagcaagcaccacttctacctactttcaaaacattttcatcaccctcaaaggaaactgcatgcccaataagcgggttcctccccatcccctctccccacagcgctgataaccactctaatgagtctttttattccccacacactttcctttttatatgcagttggactcatgctgtttaatatactgcattttattatatgaattttcctgtttaaattaaaactttttcttaggtttcaatgtaaccgcaaatccccatgatctgtgaggtggattttcatgggcgctcagctcttgctgttttagaaatcatccagcctccttcacagttgtgtttgaaatgctgtgctcttcatggggcacatggttttcagtgctggagcctttctcaccactgcatttcatgaacttgacaggtttcataagaagagactgtagacccagcccagagaagctcattttgtcctagttgcaagtgttatcaaatgactccaccaagggaatgcaaaatgaattactctaattgcactagaagcataatgtgaagtttgtatttcaccttttggcccctgggagagaaaaatgtcactgactttaaattgcttttccattttccacatagccccagtttccagtgccagcaaaaaattgccattggaaacataatgtatgctgacatgggcctacatgtatttgtatgttttctcatctgtgtggcaaaattaaaaactggatggcatgaagaagtgggcagaatcccttgtattacatgagactttgttgcctccaagctctatgatctggagccagtaatttaatgatcataatctggggtcggcaggtgcaggccatgggctgaacacaacccttagcctaattttgtatgtcctgtgaactaagaatggcttttacatttttgaagcgatgtttaaaaaataaatttaaaaaaaaaacaggaaaactagacaacatggaactatgtgtgcccctgaagcctaaaatatttattatctggctcttaatggaaaagatttgctggtctctaataataatactaataatagtagcagcagcagcaggaaaatagtttatattgtatgtcagacactgttcaaagtgcttgatatgtattatctcatttaactctcacaagtctgtgggataggtattatgattatcctcattttacaaataaagatgcccagagaggttgagtaacttgacttttcaaggccatacgtccagtaagtggtgttttgagcccaggcagtggctctctctagtgctctagatcctgaattctaccaccaccctgtgctgcaattcacagttggcttctttttctttttctctttttttttctgaggcagagtctcactctgtcccccaaggctgtaatacagtggtgtgttctcagctcaccacaacctctgcctcccgggttcaagttattcttgtgccttggcctcccaagtacctgggattacaggtgcatgccaccacgcccagctaattattgtatttttagtagagaccgggtttcaccatgttgaccaggctggtctcaaactcctggcctcaagtgatccacccacctcggcctcccaaagtgttgggttacaggcgtgagccaccgtgcacagccagttggctgatttagcttatctgtataaaaactggggcagggagtcgggggaacagcctctttcacctgtaacactgtgtgatgttaatgtactttttaggcaaatgttttaagatcattatctgtgggagctatagtcatacagtagtacttcccgaattagtggcctgaaaaaaggattccttaaaaaagtccacatataaagggggttctttggtcagctaagcatgagaaagcctttagacaggtttctttatggtagtgctttcagaagaagtatttcttttttttttttttggaggagctgggtctcagatatatttgagtcttagtgctttactctttttttttaagttttagggtacatatgcacaacgtgcaggttagttacatatgtatacatgtgccatgttggtgtgctgcacccatcaacagaagaagtattattcttatgtggatctcagcaaggaagaaagctattcagctgtttcctaaactttttttttaattttttgatgagacaccattaacatctttcagaaccagtgtggcactgaataaaagtcagtaaattatatcatagaggcattattcagctcaatatttttctagaagtatcaaaacaatgatgtaatctaaggattcatttattcatatttaccataaatattctatttattttccctgtttttccacttccacttgtcttcactcctcactgttttctgctgtgtgtggggagactttaccttaaaagacagagaaccaggtaatgaaactcaagcccaccgatttagattccttttagtagctcttatattgaaagtcctatttagtttatagaattacctatagatttgatttgcttgaactaaattggtggatgctgcctagttaagagttagacaaaggcttcttgattgattatattgatctcagactaagcaggtatgattgtcatcaagttgaaatactatttactttggcatgacttaatttgccaacattgtcaacaggtacctgtcaggaagaatgtgaccgataaatacaggccatcaactaaagaaacaactctatgaacaccttttaattcaccagctgtttactcatcccataccaacagaatttcacaaatttgactgagttgagtccaaaagtaatgctgtcaaaaaactgatggttgctgactggcttaagatgatgcttttggttttctcaacattttaaaatccctccattcttctagagctttccatttggatgccaaataatgttacataaaataaaccaaaaatcttattttatttttgaaagatttctggggatgtaggaatgtagttggtctgtggactttcaggcactaaagaacatcatgtgttgtatatctaaatcagaagcacaagtgaatataggcattaatgtaagtatactctatgtatacatttttccctcctgatcttttgtgtccataacagtatatttattgtagtagatatttggaaatagatgcagttatttgtgacaagattctatagatccaataggacattgctacagggtatctattaatatatagaatcaggcttaggcaatgcaaaaattgtgtctaaggaatgctaacaaagccatttggtatggaagtttgggactgcagcttctgaacagcacaggtgtcctcttttttcttgtgactatttagaggctctttttgacctaactggccagtgttgtcaagataaccagcaaggctgatagactgttttgactctctgggagtgactaaattaattttgtctaggaatgtataaatattatcctcacccattcaattatctctttcaaacatagccacccatactcatagatggcagcttatttcttgcacaaatactcattcaccatgctctgagggtaatttaagaatcatatgatttaattttgtctaggaatgtataaatattatcctcacccattcagttctatctttcaaatacagcctcccatgctaatagatggcagcttcttttttgctcacatactcattcagcatgctctgagggtgatttaaaaatcatatgacacttaatatatttcttctttcactttcatcaattttactctgtagcttcagactgtcaagaaaaagaggccccagttgctctctttttccccctttcaattcttctcttttagaatttgaaaactttatgaggattattattgacttcccaagggcttttgaaattaatgttgggttgtctttttaatttttgtgggggcaaaagtcctgttgctttttagccaccagtttcagaagtaggttgctgtcagtcattatcacaggctcactgatgtagctttctatcctgggtttatcaactggacttgtgtaggatggcagcttagctcctttattatgcaggaaagtcttcactgtcttttttcttgcactcatctttcttgcagcaacagttcatggtgaattgccctcttgtcccatgggcatgtgggcgtttccaacactgacattgatatcttgtgacactaacacttagtacctgcacttgtctgtccttggtggagccaggagaaatcagctgacatgaaagagagaacttgtttaatttttacttcttaacatgatttagaagttggtctgttatacaaacaaacattagtggttttgttcctttttaattttaggctggatttagtgtcctagatgaatacctttgaaagataaaatgttcatttgtcaagtcctgcctgtaccatcagcttctccactctccacctctgccactggggttttataattcccaggcctcagacctggaccaaatgctgtgggaatggggactcaggctttgggaacgctggcccttagcctctggctcctcctgctgctctgctggctctggccttggtccttaggtctggactggacagttggtggcccaagtcatgttctgatataccccaattttaagaagtagacctctgtctggtttctgtactggcccaagtcatgttctgatcatgtaccccaattctaaaaagtagacctgtgtctggtttctgtactgaatcatctggtaagagttatcccaagaagcccagatcttccagaccagaactatctcaagcaggaggagctgtaacttccaacagtcttcctctgggccagctccctgctgcctgatgagatcctggaaatcaccagctcctgaatttcctgtggctgtgaaatatcctcttacccaacctccctgcagctgcctgcattgcttttatgttgcctgtaactttctttcaaatacttcaacacatgcagtggggtgtgtgtgaattttcatccaaaaccagggaatgagaatttaaaattttaaatgctcaccctaaaggtagttagttagcgtttgaaaaatttgaatcaaagcttaaagatcaatcattatatataaattatagctcaataaaattaattcaaaataaaataaaacaagcctaccctccagtggccacctacacacccccttcagttaattttctctctcattagcaccaggtgctctgatactagcctcctggagtggtttctacatgatagacacctggaggcttgttaaaatgcagattactgggccctgcccccaagttgctgattctgtagatttgggatagggcctgagaatgggcacttccggtaaattcctatgagatgctcaacccgctgatcaagggaaccacacttgagaacctctggcataatgcagactggaactaccttttctttggtggagttcttcatggtattcaagatatgcaatttgtgtagaaataaggtacaagccctggtatccttgtgagcctagggcacaggaatctggcaagcccaaatgcctgcctggtatctgttggaagcttgttagaaatgcagaatctcagtgcagatgccaggcttactaaatccaactctgtggttcacaaatgcccccaggtgatccaaatgcacattaaagtttgagaaacacctgcccaaaccaaatttagttcacatcatctagttcaattgtcctcaactataggttcacgttagagttacctgcagtgtttaaaaaagcagattgaaagacagcccaagtacattctaattattagttagaatctctagggtgagacccaggcttctgaaatgtcttataattcccccaggtgattctaatgtaccacaggtgctgggaactaccagtctagtctctctaagtgctatccgcatagttcttttaacagtgtactagctggaaatgtcttccctttagcctgccctcaaagttaaatactgacaatttaatgccaactaaaccttctcctaattcaaatgaaatgatttcatttgccatgctttttaaaatttttttattttttatattttgtattattattattattatacttcacgttttagggtacatgtgcacaatgtgcaggttagttacatatgtatacatgtaccatgctggtgtgctgcacccattaactcgtcatttagcattaggtatatctcctaatgctgtccctcccccatcccctgaccccacaacagtccccagagtgtgatgtcccccttcctgtgtccatgtgttctcattgttcaattcccatctatgagtgagaacattcggtgtttggttttttttgtccttgtgatagtttactgagaatgatgatttccaatttcatccatgtccctacaaaggacatgaactcatcattttttatggctgcatagtattccatggtgtatatgtgccacattttcttaatccagtctatcattgttggacatttgggttggttccaagtctttgctattgtgaatagtgccgcaataaacatatgtgtgcatgtgtctttatagcagcatgatttatagtcctttgggtatatacccagtaatgggatggctgggtcaaatggtatttctagttctagatccctgaggaatcaccacactgacttccacaatggttgaactagtccacagtcccaccaacagtgcaaaagtgttcccacccctccacatcctctccagcacctgttgtttcctgactgtttaatgattgccattctaactggtgtgagatggtatctcattgtggttttgatttgcatttctctgatggccagtgatgatgaacattttttcatgtgtcttttggctgcataaatgtcttcttttgagaagtgtttgttcatatcctttgcccactttttgatggggttgtttttttcttgtaaatttgtttgagttcattgtagattctggatattagccctttgtcagatgagtaggttgcgaaaattttctcccattttgtaggttgcctgttcactctgatggtagtttcttttgctgtgcagaagctctttagtttaattagatcccatttgtcaattttgccatgtttttatagactcataagaggaaacatgttggtggtgatttatctacagtccctatttattttagaatctgaggcactggctatatttcatggcaagctaaaactcaaatgccttcatgaaactaaatttctagcttaagatgaaggtgtagttcctgcactgaatagccttcatctgtagatttgtgaaatgttgcagttttacatctaagcaccttataaggaattctatcttagacaagattagatcctgtggcaatctttatttgaaaagcttcatagtttgctccaagtgcatggaaatgtgtcttatttctcttgaatgccctttaggtcttaacagaattcacagtgccaaggagtcaaaaactatatttcaaattatatacattcctgacatattatttgagcagattaaaactgatggatagagcaatttaggcaccttgaaagtagctacttgaaaaatgccaactttttcttatctccattcacttaaacaaaaatgggccaggtgcagtggctcatgcctgtaatcccagcactttaggaggccgaagcagatacatagcttgagcccaggagtttgagaccaacctgggcaacatggccagaccccatctctgcaaaaaataccaaaattggctgggtgtggtggctcacacttgtggtctcagcttctgggaggctgaggtgggaaaatcatctggacccagggaggtcaaggcagcagtgagccttgattgtggccactgcactccagcctgggcaacagaacaaaaccctgtctcaaaacaaatagaaaagtaaaacaagaaaacaacaaaattaattgatctagatttgtgagttgtcgataccaagaagttcccatgttttaaatatttcagatggccccgtcattgattattctcacagctcagatatagggaagatgaaagctgctgcctatagcatcttgcatcctcttgcttccacatacaagaaatgtgaacttcaatcccctaaaaaggtcagagtttccattctagtgaacacatttgttcagcccaggtggggtgggacatgacaaaaaccaagagtgggtctagaaccatggggctcttcccagggctatcactatgagatagaatatcctgtgtgtagtcactctcagaaacagcagctcccttaggaaactgctgtgtcctgaatgcttgtgtcccaccaaaattaataaactgaaatcctaccctctaaggtgatggcattagaggatggggcctttgggaggtgattaggtcatgagtgtggagccctcaggaagaggattagtgtccttattttaaaaaggtaccagatagcccccttgccctttccactgcatgaggacatagctagaaggcactacctatgaactagaaagctgccactgaatctgttggcgccttgatcttggattctccagcccccagaactgtgagaaataaatttctgttgcttataagctacccatatattgtattttgttgtgtgtcaaacaaagacaaaaaccaaactcacatcttatatgggcagtggaaggagaactccaagttgaggggggctgctcttttagacctatgattctcaaattctaatgtgcacaccagtcatctggggatcatgctaaaatgcagattctgattccatggttctgggatgagacctgggactctgcattcctaacaagctcccagatgatgttgatgctgttggtcttggggccctttgagtagtaagggtttgcaacagtgcttcttaaatgtgtgtgtgcaaaagaatcacagggaaggctgattaaaacgtggattcctatttcccatcctgaagattgattcagccggaggcctgataatttgcattttaacaagttcccaggtgatcctgatgctgctggtccccagactacattttaataacaagcctctagttaacttttgaacaacttaattaagataccttcactagtagcctcttctgtgaaaacagagagccaaacatcaaaagatgaaggaggatgctactgagtccctttggagaaaattacatcacaaacttggagagtgccacagggtctctgttcatttttccattgacaatatgcttctttgactaaagacgaaaaataattcttcaggatcaaaacctagagataagattggaaccctaagattggaagtagtgctgcctgatgaataataggactagttattttaggatgacgggccagcctgtgcctagtgaaagcttagaaatgccaatagcagactgagcacggtggctcacgcctgtagttccagcactttgggaggccaaggcggacagatcatctgaggtcaggagttcaacacaccctggccgacatggtcaaaccccctctctactaagagtacaaaaaaaaaattagccgagagtggtggtgggcacccacaatcccatctactcatgaggctgaggaaggagaatcgcttgaacctgggaggtagaggttgcagtgaaccgagatcccaccactgcactccaacctgggcgacagagcaagactccatctcaaaaaaacaacaaaaaaaggaaataccgaaagcaaaatgttattggtggccaattcttaatatacgtcatgagatttggggtgatgtttacttcttactgtgtatttctttgctttacactttcctatgaagcatatttaaatattgttttcataaactgggggaaaaaccctaaccaatatttttaaaagaaaaaagtaaaatatatgctcagtgtaagttcatagtatttttggtttgtgtttgttgtatctgtgtctctctacgtttgtattttcatgggaaagggattatttttgtctatgtcagtcctaatgttcccggggcaaaggtgatagatgggtaagagcaaggtctaaacatatgcctggaagttggacagggcctggggtggtgaaaataaatttaaggagtcccagaggagaggtcaaaagctccaggagagaattagaggcagcttctctttctctccttgccctccaaacaattcagcacaagccctcaagtcccttgaagagtctttctttcccccttcttcttagaagggctgaaacacactttaagttaacttaggaatggttagaaaaggttaaaaaaatgggagaacagtagcaattaacaagctgctagggaaacagggaaaccgtgctgatccgaacatcagagccgacctcctgtggtctggttccctagcacccaggctcaggcttcggcttggggtggccggaccagaaggaaagtgccccgtgtggcagaagtcatctcaggagcgtgtcgccatccagccaatgacttgtgttccaaggactggaaaatgcgcttcctggacactatgtagatgattaccacacgagcttattttcagcaattcaagaaagaatccaattcgtggtttattgcttctgttagtctggaaatggtcaaacaagttgataggcatctagttcacgcctggcgtaactttccaacaaaactccagggctctactgacacctgctggcatttcatctactttatgttaaaaaaaccccaacaagacaaagaatcattaatatttttcctgcagtcctttgcccttgttatgttacttgtactttacctgaacgataatagaaggggcctttaccatgtcgtgaggagagaagtgtgggcaagccattgggtgaaaataaaaatccccaacacgaagaatgtaccacagagctcttgttgcctgtctgccctgcaccagctgctctgtgaccttaggcaaggccattgacctcactttcatcattgcaagaagaaagaggcagcaaccttccctcccagttccctttagggcttctgaggatgctggtggcatttcctactaactaaagcatgggccctgtcactggagtgatggccttaaaggtcactctcactgacctttccatcacaataaacaagattccttgccagcgttgtatgttcaaaagatgaatgaaagttatttaagcctcttcaaagtgcaccatctctgtaatttatttcgacaaacaactaaattagaatgatcagaaaaagcccagtgaacagtctcagaaattgtccactttttttttttttgtctaggaaactatggactttgttttgtgttttagaacatgtagtaagcctgcaggttgagaaaatgcatcccagttaatgccaacccaattatttgtgctttttctgtctattcttgggaaactctgtgtgggcctgtggtttgttaggtcaataacaggatatttgatagtctgcagggagttatagtccatatttagcctgacagaggaagtgagttctgctgatgaaaaataattgaggcatttctttaattctactatttcatttcttcatcttccttcagaatcctgaccccactatgatgcttgctgaggctttcgatgctatttacagctctgcttttgctagtcacaaaagaaaatttacctcttataacccctaagtcttccctcagaaaactgttaggtgtgaccaggatcagcaaaaactgttagattcacatccattagtttggctactacttaaaaaaagaaacaaacaaacaaaaaaacccagaaaatatcaagtgttgttgaggatgtagacaaattagaaccctgagcaaaagggttcccttgttgcatttgcagtcctttgttggtgggggaaaaatggtatggccacgatgaaaaacagtatggtatttcctttaaaaattaaaaaatagaattactatatgatccagaagttccacatctggttatttatccataaataagaattgaaagcagtaacttatttgtgtatcaatattcatagcagacatgcaattcacaatggacagggagtccatcagaggtgaatggatgagtgtattattcagcctttaaaagggaagaaattccgacacatggtagagcatggatgaactttgaggactttatgctaagtgaagaaagccagtcacaaaatgacaaattctgtatggttccatttatatgaggcacctagcatagtcagaatcacagagacagaaaggagaatggtattaatatttatcaatggctgggaggagggggagatggggagttatttaatggatatggagtttcagttttgcaagatgaaaagagttctggagatggctggttatgttggttgcataacaacatgaatgtacttactgccactgaatttttcatttaaaaatggtgaaggtgataaatgttatgttatgtccatttttaacacaattaaaattaaaagaaaggttaaacagcaaaaaacaaaacaaaaccatactctgttagaacgcagtcatcacctttgcccttacagagattaaattgcttgactttttaaaacctggttctactgggcagtgctgtccaacagtcccatctgtgatgatggaaattatctgcactgtctgagccatcaaccccatgttgatgtttaagcatgtaaaatgtgattagtgcaaatgagacactgaactttatatttattaaatttaaatagccatatgtgtctagtggataccatactagacagtgcatatagagtatacgtctatattactatctattccaagatatttttccttcctcagcactaagccgcaaatctaagcagtcaggctgtaaacctaagaaggtaaggaatcagcttatgtgtgggccaccgttctatttaacccaaatgtcaatttgctacgaagtgttttgccgagggtatgattcttctatggcattcattggcatcagtttttggacccaagggcagagttggccttaattcatgggctgagcttttctagtaaatgcccttttagagacccaaattcctctactgccatgcacaatttcccttcacttgtccttgtaaaacagtggagtgatggtatgaactacaagtgaggtccaagtccttatacagaaattatgtgagcacatcgctgtttgctctgatcaccctggcaatgaaagaatgtttttctttttaaggctttgctggaaaacataggtaagataagtaacaaactcttagattgaaaggatcacacaataaaattgatgaacccctattcatttatcctctaaagtgaaaatagttaaatatgtcatgtattttataatgctggttggaaataattaagattgccagcaactgaaaaagggcttatatttaaacaagctgcaaatagaaagcttcacaagtcagtcagtgggcaacattcctttgtggcagcccagagtttaatggcacaatagatggcacatttgtcttcatggaaagaatgaaagctgtttattaaagaataaaatatgagcctgcaaaatatagatggctgtgtgacaggaaagggacaaaagaagagtttgtgtttttattacacaaaatggatacaatctatctaataaaaactgctctatttgactccagcagatttgctcaccaagaatattttttctttctctttcagcaatgggtagaaggcctgagatcaatcatacacaacttcagggccaacaacgtcagtccaatgacatgcctcaagaaacagtgagtgttgtttgcattactcgtttttcttggcagttatcaaacaaatggtcagatgaagagatgaaggctaggtggttccttcctccaaattcctgcttgcctttccctccatgctcctgaccttggagttgaccaacacacacctgtactcttcataccacgtagaaaggcatgcatgataaacccatagcccaaaacctatatgaaaagaatagttgatggtcaaaggacactggaacctcagtcactctgtatgctgtcagttgtgggtactggcttttgtgtccccagattgagttttctgatagacagctctgcatgtctggagccatcgctgagtgctggggtaattctatcctctgctgcataaaactgagaaatgaggagtgtgaccaagagacgcacttgccaatgcacctgaaaaagaagcctcagccccaagtgcagtgctccttgtttagcacaccgtcagggatccaaagttacctctgaatttttttctgtaggattcagttatttaaagatttgatcaaggatccaatggtgatttccaaatttattttttccatgaaagaaggaattactccagcttacagtatctgaaatccagaggagtactacagtggtagatttaaaccctacccaagttaacctttcaaggtgacatgaaaatcacccacaaaggaatcctagccaaagtcaaatgtcagccagtttgaaaagcagtgatccgtgaaggtgggggccatctgccttcacagggccattggcaggcagttgtgaggtgccaaggggaaccatgttgagaaattgcagggataagcctgtatctctcaaaattatgccccagcaccaagagtgtgattcatcatactcacttggcaatgggccaagaggttagtcctaaaggtactgtcatgtcttatcttctggtcattgtggcaggtgcttacaggtgtggtctctaggctataaatcccggcttcaccatggcaaattcttacacttgtgcctcactgtcctcatctgtgaatcaaaattaccatgcagatgaaattggaaagtattctttattcaatactacttatcttgttatggtatccctccaattttctttcacccttttagtggaggaaagttatttagtcttatctatttctatgtgttgtgcagctgcttcttcttttcctctgcagttgccctggcatgtgtttttaaagagaaacccagtggatattctgatgttatgacttcaggcactgatagtcctaaagggtcaaaaacttttagaaggcttgcttatacctgagtgacacaaatatctctatctgacatgagatctaacaacatcctgcccagatccctttatgaagctggtgttcacccagccatcatctgccatgagaatgggctcaccaagggctcagacctgtccacttcttcagagcattgccctctgctgaaggggagcttccattcctggaagattatactcttccctcctccaggaggaagtccacagccaatgatgagctgcaacagggtacagaaggccatccctcttgccgccaagtctggcacaaatcacatgagttcaagctaaatcaagctccatctgaaaccacaactttgtttaactcttttttctgctcagtcttctctcactctcttcatccctaaaacatcccgttattaaagtagttagtggtgcttctacgaaacttaagacagaaactttactaaatcatcatgttctgcaaattgttagcacattattgattggaaacaggaagaatgggagtcattagctaagaaaagtcctagctccaaagtacagataaatgttctgagtctcctaaaagcctggggaaagcaaggaatttttcaccatcaatttgagttgatgaactagtcttaccactggaaattaaggaggcgcccatgtgatcagtacttggcagcactaggagctgggagtgatgagtcctcatgaattctcaagacaaggctggctgctgtcaccgtgcagttgcatttcccaccaccttaatatattattacagagcaataatcgagcagaccaatcacaaataagtaccaacaatgtgttttgctcaatggaggcacccagtcatctcatttagctagggttgccagataaaatagaggacacttagttaaatatgaattttagataagaaacaaaaatattttagtataagtatatcctatggaatgtttggagcatacttacagtaaaagaaaattacctgttgtttttctgaaattcaagtttaactgagagctctatatatttatgtgctaaatctgacaaccctaaattcatcttatagcacataattgtctgattttcagaaccaatgttcttgatttaaatgaactttcttttaaagttcttaacagaattgaagctgctccctctaagaaacattaaggcaatgttattgctattgttttgcagctggatgaaattggcatttatgaccaacacaaatggtaaaattccagttaggaggtaagtaatcattcctatctgctgtccgtgtcccgggtcaacgcttgtcatcccaaaccaaagagagaacccttcacaagtatttgtgtgttaaatgctttaaagatatttctggaatcttagtttcaattgctttgacaaatgctatattcagtttgtaaaaatcatttatggaagtaaaactgcatttttttggtcaaaataggtggcaaaagaggtactttgacaatttaaagaacatcagaaaatgtagaactattttttaaaatcggcaaataagtggtttttaggatttatgtttcttttgcttatttgccatgagaaactgttagctaaacttaaagaagattttattgtgcacctactgtggaagggtgtggaccgtgtcttgagaagtgtgatgcctctgaacagagcattttcattctgggctttgctgctcctctggtgctcagggcagatggggatacttctctggcttcgtgctgcctactctctacatgtactgtaactgacaccacacactctgtggagctatcctttccacctttgccctgatgcaggtaacaatgacaaagaataaaaaggcttgaggcagggcatggtggctcatacctgtaatcccagcactttgggaggccgcagcgggtggatcacaggtcaggagatcaacaccatccctgctaacacagtgaaactccgtctctactaaaaatacaaaaagaaaaaaaaaattagccgggtgtggtggcaggcacctgtagtcccagctactgggaggctgaggcaggagaatggcatggaacctggaggcagagcttgcagtgagtcgagatggcaccactgcactccagcctgggtgacagagtgagactccatctcaaaaaaaaaaaaaaaaaaaaaagacttgagtggaatcaagaataaagaaaacatggacaggatacatcctccacatgtgttctttaatacttaagtggacagatttcaccctctgaggattccccatgcatccctcttttctgcttctcacttccttccaggggttagggtttacacatggtctctgggtacagttggaaactctttccacagtagtgatgggaattctttaccaaactcttcagtacctttttggttggtgtttgttttaagcattcatggaaattccagaagctgggctgggccccagggcatctgcttttcacatgaagacaggcatgtatctggattcgtgaacctaagcccacaaccagaatcaaacatgggttccccagatgccaactctctcttccagggttctccagactcaggttcatgttcacttctctggacaccactttagcaaatacgcaaatcaacaaataataacaaacaaaacccagaactactgggtggaatcctgtcttagaattgatctgtctttcagaaataaccaggtcaccgagtgcgtagcatctgtgtggatgcattgagcagtggcatgtgctgtggctcctggcatttctgactctcctttgcctccttccctgcccagctgcttcattctgctctgcagcttccattctgcatccctgtgagactatctccatactcccttgacattactcttttcatatttaacagaattgtcccagaagacctcatttttctcaatcttgtatattaaacaatcacgacctaaagtatccatgtgaccacttaaatatcgagaaaatgtaaagcacagaagtcatgaagaccttagacaattttttttaaatttaactctttattgagggcttgttgagtcatggacctcatgcatttgttgtggtctttccaaatctatctgtaggattctctgcttttatttaataacttgctagcaagtcaacttttagtctgctttagaagattgaaaaaagccctgttagcagccttgactgatggttgttggcagatactttatgcttatccttatttaaaatcctttgctcagttgagtaatagcagaacaattattttaatgtatcccagtaccctacagctattgcatttttatttaaaatcagagagcacaaagcagtgtgaagaatagaaatgtaggttggatgtgtttttacatgccttactatcctgctttttcttccaagatgaggttcaggaaatgggcaaagtagagacacatagattgtgatcaaagcacttctaaccagcagtcttggtttcatttgtatgtatcctatgaatcaagtcattgtcatacaagctttgaagtcgtttctgattccagtgatttttatctaacatgttcacatacaaaattattaccacctttttgtagaaatagcttagatattttggcatcttctttagctctctttgacatggactccatggtgcttgccagtattaacaggtgtttgacacaagacggctgtgatttgggggcagtttgttagagttgatggagaattgataccatgccagaaaaaaaatcagataactctattggtgaatgagctgccaagagttagttggaaattgttgtgtatgttttaatggatatgaagagtaaacacttttaaaatgttattcactatcattctgaagtttctaaaatggaaactattagtgtactgtccataatattaaaagagatctggcttcatagtgattacatagcttgggaatggttcctgctctttagcattaaaccaaaatttaatatccaggaagttgcaggaataacacatgaagaaagtcttaccttttgtctccctcttctcttgtcttgctgtttacataacccatgcagtctgcctttctctcaaattcacaaatttacactcagtttatcctcccactcagaccaaagttttggaaataacaattctcttttgccaccttccctcctctctcgtaacctggagtgaacaccaatgactagaaaattgggaagtgagtagccagacagtagttgtgggcaggggctggaagagatcccaaacaaaacggctgtgttaaagaaggctgagagccgcaggtgccgtcttggaagcatccctatataatcagcccaaccatgtcctgaaggcccagcagcccacgaagaaggtatgattctgctggggcagttgccccatccttcactcaagagttctctgtaactttcagaacacggtgttaaaaccatcgtgtagattgcagaccctgtttcagctagcaaagagtgggactcccttagtttctaggatcgttgctgttttagccacttgcgaagtcccccggaatagaatttaaccaggactctaataggactggacacaactcaggggtgtttgcttttgtagcatttcttttggggaatgggggtggtttagtttgattcaacaaaaactcattgagtaccagttagctatgaggcactaagcttatgtgaacatggggctatatagagatttgagtaaatcacattccctttgtaaatgctctatgttcccatgaaacacagccacgatattatctcccttcttggccccctccatctcccttccccttgagacattcttctactttctatttgttggcacctggccaaaccctagccaaaagattcaatttctgtgtaggaaacagaagctattggtacccaggttctgtttcaccagaaaggctcagtctccacacccgctgatttcatgcccacgttgatcagttttcatctcgttatgccaggcatgtccaaacctaacagaggcttcagttagctgggatacccctgagattgctatgcaaagattgttctcctgagagcaaatgccagatcctgccagagtcttactagctaggttaacacaaactttttatgaaataatagtcaccctgaacagctactttcccctaaattaaaaaggctacaaaatttttgtcttaccccaaatttaatgtataaaaattacctgaactctagagatgaaaaatgtaaacatagcaccctctatactaggaatcttaaccatttattgatgtcacacacatattctctcccatatttgtagatttgttaaagagaattcacaggcctccttatatttgaatacaactgtctcaagaactcttaaaaatgtacttcttgaagtattcttggacctggcatgaaacaataaagctgtgaatgaacacataattcatttacctacagctacttcttagtctattttgggaagtcctactctgccactgaagtggtgctttctcccactcaggaagaggaactgtcagcactctcattcagaacttgccttctacttagcacggatggcggaaagtacaaaaacgctgggcatgagatgctgttaaaaatccttctgtgctcacaggggaggcattccaaagccagccctcatggatagaagtaaaactccatcctcaagtcaagctggacttctgaatgtcgagttaaaatgaaattatcatggtaacacattacctgggcttccaatcagggagcgattgaaggctccttggtggctaaggtatggctcagagccaagtgtggtgttccagggtaccaagtcctctgctcaatagctttcattctgagtggcaccaacacatttataatggagagtctctcctaacttttatcatcaccaggaagtgtgttcatcaaggtgttatctattctactagccttgatgctcactgttctagttaaaaggctatccaaaaatactatgtcttggggtactactgagatttgttgaaacattggataattgttccccttccccctcacccaacccatcatgttgacagtaaagtcccttatccttgaggcagctgacatttcagaggggctcaagggtgcttagcttgaaaacaagaacaaaatatgtctgatcacgcccgtgtcaactgtggttaagtgtgggaaccaggataaggacaactgaaggcatggattgagttgtaaggggccgcctccttttccctaggcccagatattgtcaacatgagggtttgttctagagctactgtcttatctgccacattcctttttcataagaaggcaatttggtagcatcagaatttatcattgtttttgtccaaaaatgtgtgtcccaggccaggcgctgtggctcatgcctgtaatcctagcactttgggaggccgaggtgggtggatcacctgaggtcaggagtttgagaccagcctcaccaatatgatgaaaccccgtctctactaaaaatacaaaaaattagccaggtgtggtggcgtgcacctgtagtcccagctacttgggaggctgaggcgggagaattgcttgaacctgggatgcagaggttgcagtgagctgagatagcgccactgcactccagcctaggtgacagagtgagactctgtctcaaaaaataaaaaataaaaaataaatgtgtgtccctccagtgccgcttgccccttgttctcccaagcaccagggggacccctggtcttagattcaagttgcatcactagactaaccagctctgggaaccagagggacactggaggaactagtttgggaaatgaaaaacatctgcaatgagaggtaattttattctcctcttccttttaccctagtctcactctccatagtaggacctggatctttgcatcagagaaaacataatgaacaataactggaatgtgtgtttctttcttttctgccctagtattactagaacatttgcatcgggaaaaacagaaaaggtgatctttcaagcactcaaggagttaggtcttcccagtggaaaggtatgcattaacttaataatgtatttctaaaaccattttgtttatttatcttctcatatgtaatgagctagattatttatattaaactgatctaaattagatttggaattatatgtcagtgacatatagtacagttaattttcttttctttcttcttcctccctctcccttcctctctccctccctcctttccttcctcccttccttccttttgttgcctgggcattttaacctaaatctctaaaaatgtaaatagtttgcttcaaatgatttttgtcacctttcttaagaaaaggaaatgaaggccagcttgctgtgttacacagtttttattttagagaagctcaccaacactgcctcaaccaggcacaacattagcatgaataattaactaataaattcaattctacaagatggctatgcaatattttgtgaagcatctctccccgcaccatttgtattcatggcccttcaaatttaaaataattgaaattaatttattgacttgaagaaagattgaagcctggtactattttaataagtcctatttgaaatataaatttcagtttgaaaagtaaaatcttacatggttaccctaagcccgttcacatggtcttgcaaaaattcacaaaataagcataattaaaccttgggcttgatttattcagcatccctcaggcaggcacttttctccctcaaggtgagttggaggaaatatttatattcgttctttggggtatttcccagagcaaggccagctgtagccaggtgttcgcacacacagaatctggcagcatgataactagaaacactgatgtacacgcactgttttttagtgagatggcctggcagtgcctggaagttggcctcctggcttctgtcagcaggaatcagagatgaagaccctgagtccaagtggtcttcactgtgcttcatgaccctgtagcttctcaccctccaagggaaaaacggttctgtgattcataacatgattttattccttacagaatgatgaaattgagcccacagcattttcttatgaaaagttctatgaactgacacaaaagatttgtcctcggacagatatagaagatcttttcaaaaaaatgtaagttccacttatgaggaagtgccatataaatattatcactgtccttttcgattttttaaaacgtttttgtcctattttaatagagtatgttggtagcatctaggaatatctagtcagggttacatttttaaccccatactttatcagtgtaaaagttcactctgagtttttgagaaacttttacgtatattaattgcagcacctggaacttttttttgcattggctttactaactacctacaattttaacctgctcctttaggtattaacccattatgtgaactaactagattcaatttggaatgttaatatgtttttgaaaagttgattcattccaattatttcaaatggatgacttacatgttgtttttgaaataatatcttttgaaaacggtaaaaaaaaaaaaaaattgcagactttttctgtgacctagtgggagtgttttccttctgttgttgttgttgttgttgttttatttttctccctttatgaacagtctctggccattttaagaattcaccactacttcagggttagaaaataagtttagaattatcatcaacaaatgtcaacatgtaaatcgtacatactgtagcatcatatacaaaaacttactttttctaataaatttcttttcagcaatggagacaaaactgattatttaacggtagaccaattagtgagctttctaaatgaagtaagctttttcatacattaactccataaagtctgtgtgcagtggcttgccttctctggtgtcctcattgcatgcctgcatcatatgcccttattcgctttgcttctgacctgctgatctttccattatggctttaccaggtgcaaaaatcagctgccgccctgtgtgttcatgtgctttcttcacattggctttgcacaccactttttgttggtttctggctgttacatgtagctctggttctgtgtgtatgtgtgaattgtataatatattcatttaagtaaatgtgtctgtgtttttgcaagatgatatttaaggtactttttttctattgatctcattaaatagaaagagaatggattgagtttactacactgtagttggattctccattgctaactttatctcatacctttgcatggactggaaagctttatttttgtcttttaatggattgcatgtaagaaaaatatgttggctcaaatagaatattttgacaacaagcaaaacacttgagttcctgggtgaaaatacattgagttttaggctaataggattgcaggttaaatttgtactttttctttttataacaagctcagagctaattttagaatgtgattaacttaacaaccaaaactgatagatagaattgcttaagcacaagagaaaaatattttcgaacaaaaaaagtttgcaacttttattacaactaaaatgaactacttttttcttcacacatacaaaaaaagttttcccttcagtgaaacccatcaagactcttgttaatccaaaatggaaaattcacttttttttctaacacattaataagagtttgagtgaaggatggacagtatgcttttgtttcaaaataatttaagttaatcattataccatataaagagaaaatgcaagaaaagatggtatcatgccagataaaacgtattatcttaagaaaagataaaaaggcagaccttaatttgccacttcatagagacaaattacatcttcttttcttccgttgtgaaggttcagtggcttcaaatttataaaggtcgcactttagaaactatgttaactaaagtgtaaatgcactgatgcaagaaagagaaaatcctaccccacatatcagacagatgcctctaaaataatccttcgtgtacaatacaatgtttattttactcgaaaacatttcaaatttttccactccactggtttttagtcatataaatacaatgttcataatctttacccagatactatccacgttcttatgccacagctgctcagaagttaaattgctttgttttgtttctttaaccccttccccttcttctgccttttgttttttggtttcttgttttgttttgttttatatcccttggcttcttcatgcactttggttcagtgatcatcttaggtttggtgaggtgaagagggaagacggtttagtgtaaaggagaaaatctaccacatcttcagtttgccacttccaagacaaggcctcttgtgttctttgggatgaagccctctcttaaacattacagagaccttaatactgcatttcactgttaaagaatgaagcaactcttaggtcttgaggataagtgcagtatttataggctcttatctaatgcatttccttttatgggttgtttttgttggtgctcccaacagtcactcctgtaattcttagacataacatttaattttttaaaaatatcatcatccatactttcttgttctgccattcagattctttctttaagtatttattatttgtcaaccttttatccctcacaattacagtagacaatagtattcttttttttaatagtgtttccttctatttgatgtcttcttaacattaaggaagtaccttaaattttggggtgtgactgatggaatcggtgtgattctagatttctttaggtcataggaactgtaagactactcaggaaagtctatagcctttatttttaatccaagtgtctgccctgaatttattccttttctatcctagtgaactcaactggaagaactagacaaaaacatgaatgtcggcttgaagaagccttgtcaaacatagagaacattctgcctgttccttgcactccctcttttgagtcctaccctggcccctcttatctctccaaaatcaaaaacaccccttgggcagaacaacttcaatactcataacaaaaggagacagacagagctcactcaagaaagaatgggcattggaatgtaagggtcaattactccaagagtttaaacctaaacattttcaaaatgccttagccacatagtctcaacaagccagtattcaacactgcattggaagcccctgtgaaggttccttgtgaaggttcaatggcttcaaatttataaagcttgcactttagaaactctgttaactgaagtgtaaatgcactgatgcaagaaagagcaagtactaccccacatatcagacagatgcctctacttttaaataatcctttgagtatgatacgatgtttattttacttgaaaatatttcaagtttttccactccactggttcatataatgagacaaaaaaataaacaagtcccatgaacactggaaaggacaaggtcctagtctcatttgcagatgttgattgtctactctgatataaacaattccacggaaaaactgtttgaagtaattagagagttcagcaaggtaaccagagaaacaatgagcaaagcaaaaacctggagacacacatacactgccattaaccaggtagaatagatagtaggaaaacataaatcccatttatattagcaaaagacatgctggttcctaccaccttccagctggttaatcctttcactctttctatgaaagtttttattcatatactaatgtgtatcttcagggggctgcaaggagaggagagactatatatatagtccatttactgctttggtcaccctgtagggtgacctcctccctatccatgcaatcaacactgactagattttcagtagtagctttagacctgactcctcattggcttctcagtatttccttgttcgttgctccccaaagtgtgatccatggaccagcagcatcggcaccccttgggagcttattagaaatgctcagtcttgggtcccacccagacctgctgagtcagagtctgaatttaacaagatctccaggtgatttatctgcacattcaagtttgtaaagcaccatcctagtggattactggattcctccttggaatgtttagtgtgagtgggaagaatatgagagcgacatataccttctgttattctccattaagaatttagccataggaatccaccactcagagctaaaattttgccacatctatgtctcttagtctcatccaatggactgagggaaatcttctttgcctataatatgaaaatagcaaactagagtccaggagggatagcagaggcacttaatgtgagctgccacgtggtgagacactactactggctcaattgcttgtatgtggcaagactagataaaacctcttggctttggttagttttacctccctttccctattcctaatgagaagcaaaattgatttttagttttaccttcattctttgtttgacttcttacaaagatgataactagggtcctgcagaattgggagatgggtggagggcaggagagagggataaaaacaaggaagagagggaaaaggccttaggtggccacaggaatcaaggagtagctttactttcttgttgctggtaatcttcccccttcctcacacatatcataggatcacatcagggctcaacctgacttttttctttttgcagatgaaagaatattttaaaaggacccatgatctctttccttttacaagatctttatgctttaaatgcacaggcaaagagagagaaggagggtatttagtcttatgagtaagcttatccttgccaattattccttctatatttttaaaatattatttatgtcaacattcatctctcccagtgctacttggattgaagccagacgatgcctcttctcagcaccagtaaggacgtaatactggagttctcttcatctcctccttacttacttggacacagttctgtgacctatttttggaagtcatttagaatctcattttacaaagcactggataccatggggtgaataacctgagtaacttgtttccccaaatcctggctgaaaactgatggttcctcagagatgtgaaacattcacctcactgtgcttgtgtctctgtggaactctactgcagccttattactgtgagatcagctggaagtgatccttctcctcttgtttttccatatgaaaatgatagttttctgactctaatgcaaatcttatatttgtttccttgcctttggattacccagattgatttgtgttacctttttgaagcatgaagattttagggagagctgaagattgttatctagtgggagcagaagcaaaaacaaatgcaatttcgcattgtctgcacttcatgcttatttgctgcgaatgtaattttcagaataggggattatgatacatccattttagggcttggttttcctggctttgttttgccataggcaggatggtctaatgaatgtcataccctctgactaaattttaatagtgtttaattgggaggacatctgaaacactgaacatgcttctatccttgtgagacttaggtacttttctttttactgatgtgcaaatatgttaaaatgcatacctttatatgttaggtaaagtgattcttatacttgagcacatcagaattactcagaagtcttatgaaaaacacagattaataggttccaccccagagatcagcagattcagtagatctagggagggacctgagaagctgcatttctagcaagttgacaggtgttggtgaggctgatgctgccatccacagatcacacttcaggtagtaccttgtcagaataaacacatgtatgtatattttaaaatgcacaaaaatgtctgagttctgtctcctttcctaattttatctcttctctctcctgtagctgaatcccttttttctctcattttttaattcatatggatttgccccatcatctccatgagttcaaaatatttaccaacaaacatatttttaaatttaaaaaacttaattttaataaggaagataaataaagtggccacctatgaacataacagtgctggggtctaaaaaggacctttttcatcctttatccatcttctaccatgatattatttatggagatgtgagaagggatgtgcctagaaagatgggtttgttgttgttgtcagtttgtttgtttttaaaacaatgcattctcaccagaaagacggagctccttgtttccttgagtagtgggctccattgcacgatggcatcaatttcctaaacaaggtgtagcatgccttcacttgcctggcattccatggtccacctcacaatcctcttccctgcatatcccataacttttgttcttggtggcctcgaggcctgctgttaacataacagtttctgttgtagcatatgcatgaatgttagctgttgtgagccataatttcttagattacaacagaagcatgcttcattgggataaattgatgaaatttgatattgattccttatgagttaatgctcttaactcggtgggggaggaggggacccagaaaaggctgggccccatatgcatgaggaaatgacatccaagtgctctgttggccaaaagcattcattctgtgtatagctcacttttccaatgcccattccaaagcaaatagggaagggaaatccatatgaacttttaacagttgctttttaaatacctttccaacaatgtttttcagtccgtgcatatatttgggtaaagagttgtcaccaaggtcctatttattgaccaggttttgctcacacctgcttatctgtcattattccaaacttccattgaggtttgctttatttattcacttattcattatttttgtaagggctgaccagggacacagtgctgtcctctaatcctcagtgaacagaaaggaagtttagtggacccactgccaacacacatacacacacaaacacacactattggagctgagtaagttagtaaactgggtttttcatcattgccatgaagttaggatgataccattgcagggacagcattgctcctggtgcctcatgtcatagcaggagctccttaggtgtcaatttgaaaacaataatgtcaccaacctcttaagtcccgtaatcattcatggactctctgcccagagaattctatattgtttatagcttgtaaatatgcttgtactgattaattttcatcattacaattggttcgttttgaaaaaaatagttactcaagaaaatgaaatttgttgagtgcccaagaaatcatggattgatgtagaaaggtgttatgaaaaagagatgatgtttgcctgtgtaacattaggctttttgttgttattgcttttggggtttttgaggggtgcacttaaattagtatattacctatttgaactattttggggggttggtgtttgctttttaaaaatattttgacctcacgttttatagatattcatgccaaatgtcttccctgttgtgtgggaactggaagacagtacaattgacatgcacactttattatgtatccttcaacttttgaaggggaaaaaatgtattctctctctctctctagttcagggagagtaacccaaaagtattcccaaatgtggactttttgaagtatactttaaggagaaaggcaggaaggcagtgaggtcctatctttgtaattataaacatgacagtctagatatattttgttttataaattataaacttagtaatgtctaatgcctcaaggccaagaaatatcaacctaaatggagttattttcttatcatagcatcaacgagatcctcgattgaatgaaattttatttccattttatgatgccaaaagggcaatgcagatcattgagatgtatgaacctgatgaagatttgaagaaaaaaggtaataaacatgaaaaaaggacttaaaaaaaaaaacaagaaaagatgcaacttttaaagccttggtttatttaaaggtatctgtaaatgctttgcaactccctgagccatggattgatgactatttttttttcctgctcttaagttcgtataaattttacctttcatcagaattagtcaatcctgactgaagtatactgttacatttattgtattattaaatacattatagtgatgtttccccatgtactttcttgtattagattttagtattgcatattgcttgaaatattaaaacaaccaatacagtctctacttgcaatccttgaaaataatttttgtcatataaaaacttataccttttctttttctcccttttgttttgccaagccaaataaatttaatacgtgatttgatgtgcagtaaccctcatttgacctctggtatgaaagataaatacaattgatatgaaattaaatagtcaggaatcgccttagctaattgctggacctttgtccctttcaaagaagctttggaaacaaagggttgttcgcacaaatatttgtcaaaggaaaggcatggggagaaattttaaaatcagtcccacagcagtgagaaatgcctgcggaacatgggagggagagctgggggtacctgagctagagcctttggcgttatgtctcagtggagaatgtaaagagatgaaagttcaagttccataggtcccgtatgtccgtgaatctcaaggtctcagtttcctcctttttaaaatctatttttttctttgtatctaatgccagtgagtgtggttgaatggtctgtatgttatctggaccctctttttaggtatacctggccctctacactccatgatttcacccctgatatttttccaagcccaatagttttccctttagttgtagttgtacagtttacactttctgctatggctgaagatacctattttaagcaagaatgcttcattccttccctctctgtcaatattctgaatatcataatttatttcacattgcttatgattacagcaaagggaggtacagcttggtagaaaatctaacacttcgcattggcaggaggtgatatgattcttgtcacttccctgtgaccttgagctaggaactggcctcctgggcctcagtttccctgcttgtaaggtggtggggctcatgcagtaatttggctagtatttcccttccctaccttcattctttgaagtttgtagagggctgaccgggtgccaagcactgtgccagatgctaggaattcaaaacaataagaaatgtccccagccttgaaggcagttgcgatctgttcaaggagaaagacaagtgattcaacaattccttggcagtgtgataaatgtcatgattgaggtgtgtccttgtttatttccaaattccttctaagttttaaaggtctatgaagtgaccattgacacatctaaaaagggtagcttgaccatttcacaagtgatggaaattttaacgtctgtcattttcaagcgtgggtgagaatggagtacaaagccattcttataaacttctggtaagaccctacattggtacaaccatcttggggaatattttggcaatagtttataaagtgaaaaatatgcctcttatacagcccagcattttcacttctaggtatgtaccctagagaatctctcatctatttcccaaactctggataccagagcggcacagttctcagatctctgctccacctatattcactctgtacctgagctcatccaagccaatggctttacatttcttctattaaactctccagtcctaacctccagcttacactacagacttgtagtagaactctccatctggatgttgaatgggcatttccaatgtatatatacaacatatttcgatccttcctacccctagatatgttcctttcaaagcctataaaatagtaccgttatttacccagtcaaaaccactgggctcatgttggacttgtttcattctttcacatcatgtctggttcatttgcaaaacctgtaagatccagcctcaaaagaaatcctaaataaatcacttctcaccatctccaacattactgactatccaaaccttcatcatccctctccaggcaatgccttctccttcctactcagtgccctacaatttatggtccacacagcagccagagtaaaccttttaaaaccaaatctaatcatgttattccaccctttgaaaccctccaaaggcttcccaacacatttagaataaaatctaaaatacttagtgaggactaaagcccaagtgatgtagcctttggctccatctccaatctcacttcaagctacctttttccttggtcacttgctctgtcttgctgtcattgaatgatgttggcacgcatacatctgcatcaaggtctttgcacttgatgatccttctgcctggactggtgtttcctgggtgtgcacgtggcttgctcctcacacatgtacgtgacctcagaagggctttcactggcccatatttaacacagcatcctgccatgcttcatcaccttcctccctgctttctctgtccttctagtacctctttgacattatatttatttgtttacttatttgtttctgtcactcataatatgagagtttcatgaaggcagggcttacctgtttcttctatcactgcatctatcctggtgcctctaaaagtacttgctctttagaatgaatgaaggtgcccaaggaaagaggtatacaaatttctactttcatttataattagaaatgacctaactatccatcaaccaaataatggataataaattatgatatattcatatatggacttctgtaccttcagtgaaaaataaatgaacaagatctacctacatagctggtatataaagataaaaatagcaagttgcaaatgcacacagtgggatagtttttacataaaattaaaaacagcccaaactacccgttgtttggataaatgcatatgtagtaaggttgcagaaccattttggaggtaaacaccaaaactaggatactagttatctatctggtatggaatggaattgaggtggggtatacaggatgctgcagtggcatcagaaattatgtattcttttacatgtaagtcaaataatcaaaaatgtaaatcaaataaggcaaaatgttgagatctgaccacactggtgtaggcccgtggctattcattatgctatcatctgaacacttctgtattagcttgaaatcagttcataacttgcaagttcttaaataaaacaaaaacttgaagctgtcgatgcatcaaccatttataagttgcataaatactgattgttgctcctgtagttaccacgtgggctctaccccatgtcagaaaggtgtgatcgaaatgaagggtggcttttggggccacgtttcaatgaccactgtatactcttctcaccagtcccataacctgacttttagataaaattgaaaactgaattgtttaaactcagaagcaccatcatctccaagaaaaatcccttttccaattcagtgagaacaatgtcttataattaatacattttccatttttaaagagcacctctcgtatctattctcatttcccattatgaagatcttggaagtcagataggtccagtctttttccccaattgacagaagaagaagctgagatctaggagccaaaggagtgagtagcaagagcagaacttgatacaggccccctggacccctggtcaccataactctcagtgctgtgtttctgaacttgggggaccatgtacatctgccatcatggatgtaaaagcagaataccacctgtttgtggaattcattatgttacttataatgtgcaactctcttatttcattcaagttctgacagatgaaagttcttgggaaagagactgtgaagacgtttttactcttataatttaagctgcctcagcttccatgaataaaacatgagatatgcatcttcagagctacaagtgctactaagatgttctttttcccctaggccttatatcaagtgatgggttttgcagatatctgatgtcagatgaaaacgccccagtcttcctagatcgtttagaactttaccaagaaatggaccatcctctggctcactacttcatcagttcttcccataacacttatctcactggcagacagttcggcgggaagtcttcggtagaaatgtacagacaggttctcctggctggttgcaggtgaggaactcaagatggcaatttgttttttgtgtgtgatgcccttcagtttaatttacttttctctgaaaaacaggaaatagtaatcaggatgaaaaggaaatttgtttattccctttaatggattatcatggtcatttaacgttgagaaaagaaggacagtatctctttcggaaaaatcttcagtcatccaaaagactttactgtgaaaagacttttctttactgtaaatttaaaatatgcctccaaaaccacaaaaaagaaaacatgcatattgtaagaaggcgtgttgagttttttgttgattataggtacttgttactagcaccatgctctaaccaattgagctaactggccattgattataggcacttgtaaattagctttttttttttttttttagtatttattgatcattcttgggtgtttctcagtttctcagagagggggatgtggcagggtcataggataatagtggagagaaggtcagcagataaacacgtgaacaaaggtctctggttttcctaggcagaggtccctgccgccttcggcagtgtttgtgtccctgggtacttgagattagggagtggtgatgactcttaactagcatgctgccttctagcatctgtttaacaaagcacatcttgtaccgcccttaatccatttaaccctgagttgacacagcacatgtttcagagagcacggggttgggggtaagattatagattaacagcatcccaaggcagaagaatttttcttagtacagaacaaaatggtgtctcctatgtcaacttcttactacacagacacagtaacaatctgatctctctttcttttccccacatttcccccttttcttttcgacaaaaccgccatcgtcatcatggcccgttctcgatggtcactgtctctttggagctgttgggtacacttcccagatggggcggcctggcagaggtgctcctcacctcccagatgatgggcggccaggcagaggtgctccccacctcccagacggggcggccgggcagaggcgctcctcacctcccagatggggtggcggctgggcagaggcgctcctcacttcccagtcgtggcggctgggcaaaggcgcttctcacatcccagacggggtggcggccgggcaaaggctctcctcacttctcagacggggcggctggcagaggcgctcctcacatcccagatggggtggcggccgggcagaggcgctcctcacctcccagatggggtggtggccgggcagaggcgctcctcacctcccagacggggcagccgggcagaggcgctcctcgcttcccagacggggcggccgggcagaggtgctcctcgcttcccagacggggcagccgggcagaggggctccccacatcccagacgatgggcagccaggcagagatgctccccacttcctagacggggtggcggccgggcagaggctgtaatcttagcactttgggaggccaaggcaggcggctggaaggtggaggttgtggcgagccgagatcacgccactacactccagcctgggcaacactgagcattgagtgagcgagactccgtctgcaatcccagcaccccgggaggccgaggctggcagaccactcgaggtcaggagccggagaccagccccgtcaacagggcgataccccatctcctccaaaaatagaaaaaccagtcaggcgtggtggcgcacacccgcaatcccaggcacttggcaggccgaggcaggagaaccacggaagtccggggcagagaggctgcagcgagccgagaccacggcagtatagtccagcctcggcaacggagggagaccgaagaaaggagggagggggagggggagagggagagggagagggtaaattagctttatttgatgtaaaagttcaaaaatttagttctctgagagtagaaattattaaaatcgtttttgttttatagaaactggcaaatatttgagatttaaaatatggcaaaaatgatgaaagtgaaaaataagaaatgtagttacattatgtttttttcttggttataaattaaacaatactttatttttttaattcatttttttttggatatggaaatatgttaaaagaaattaactgtcttactacttccatttgcaaacttcctctgaatacctgagtatgaatcactaaacattttctgaaatggccaaagtaacattatccagcctatcaaaattaaaagtaatttttttaatttattttattttattattattatactttaagttttagggtacatatgcacaacgtgcaggtttgttatatatgtatacatgcgccatgttggtgtcctgcacccattaactcgtcatttagcattagatatatctcctaatgctatccctcccccctccccccaccccacaacagtcccatgtcatctaaaacccagcccacattcatatttccccagttgtccccaaccaaattgtccttttttttttttttaattgggacagagtcttactttgttgcccaggctggagtgcagtggcatgatgtcagctcactggaacctcccctcctgggttcaagcaattctcatgccttagcctcccaggtagctgggattacagcctcccaagtagccatcacacctggctaatttttgtatttttagtagagatggggtttcaccatgttggccaggctggtctccaactcctgacctcaagtgatccgccttcctaggacacaccacgcccggcccccaaattgtcctttattgcgttttgtcacaagtaggatttcatccagaaccatgatgcttgttatatttcttaagtctcttaatctcactcagacaatccccttttgataataccaaccagatgaggaatataatgtggttttaacctgtatatgccatgaaataatcaggttacttaatttattcaattttctgttctggaagaaaacaacttattttgatgtctttcttttaatttgtatgaacactatttcattgtaaagtttcaatattgtaacttcactatatccctagatgtgttgaacttgactgctgggatggaaaaggtgaagaccaagaaccaataataactcatggaaaagcaatgtgtacagatatcctttttaaggtaactttaaaaataattacacagacttttccaaactctgtgaaaatgcaggaaatagggagatggagaagagaaaacaaatgattcattttctcaagcattatgccttcatattcccttcttccagtcttgaggaaaaagtcaagacaaagatcttttccactgaacgtccccttcatgatactgttcttgctttcaaatggtgactgtgttacataacaaggtttctctggcagagtttacctagttttacttaccttagaaacagtgtctccttttgttatctacttatttgcttatttactttacattattcctaaaggacttcaaggtggcataaaaagataaatagaatacaggaataaaatagattgtaaatagggcctacaagaataagaaaggccgggcgtggtggctcacgcctgtaatcccagcactttgggaagccgaggcagggagatcacctgagatcaggagttggagaccagcctgaccaacatggggaaaccctgtctctaccaaaaatgcaaaattagctgggcatggtggcacatgcctgtaatctcagctactcaggaggctgaggcaggagaatggcttgaacccgagaggtggaggttgcagtgagccgagattacactgttgcattctagcctggacaacaagagtgaaactccatctcaataaataaataagtaaataataagataatgaggttagacaaatcaaaagaatgaaattctgtggtttgcaaatgtcagctgcagctgtctgtcggtttggtataactcaggatagatattacaacaccaggagcagcggttctcaactccacctacatgtgaaacatcaccatgggtattttcaaaaacataggtgctgctgggcgtggtggctcatgcctataatcccaacactttgggaggtggaggcaggtggatcacttgacgtcaggagttcaagatcagcctggccaacatggtgaaaccctgtctgtactaaaaatacaaaaattagctggtgtggtggcatgcacctgtaatcccagctgaggcagagtcaggagaattgcttgaacacaggaggcagaggttgcagtgaaaccagatcatgccattgctctccagcctcagcaacagagcgagactctgtctcaaaaaaaacacacatacacacacacgcagatgtctagatgctatgcatagtatttctcttagccaagatattggagagttttgaccagcaatgaattcaagataatacttcttgatatgtaccaagagtatattcaagtgggaagccatgaatttgcatagccaggaagaataactaaatgactacctcagccacaaggaatgcctcaataaaatatttcaagattatctaaccttgggctttatcatgtcaaatggatttgcctagataactattgtgaaatatttttctgattaactgaatgatgagatttgccctgtgattagctacaaaccagtaagaatttggggatttttaccaaatatgatgctccggttgtagaagtgctggtttgaagcctttctttctaaagctaagcagagacggggccaaccatctcttaaagcctctcctatttcatggagaatagtgaaagggaagattatgtttagctccttcaaatgttgttttctgtaattaagttctgtgttacagatggggggtcaagaacacttctatgtttcacttacatgttgcttgaccaacgagaaccccttcccccggccttgtaaccaggctaataggaaacaagggatactgcaaatgtcactttagtacacagaggtctacatcaagttaatgaagtatagcccaagactgatttccaaacacagaggaaagtcagtgaaagcctccagcagtcctgaggttactacccacacttttctgcatgaggtggggaggagtcatacagtggtcgggagtgaaaacctctgtgccagagatcacctgctcctcaagaagaaaggtggactctgaactcctggcctggcagattaacaagccacagactggcatgccatttaggtgaaatctcttgtaagttaatagcaccataattctggagaagtaaaagatagcttaaaaaattgtcattaaccattaactgcaccctggctataaccacagggaactcaacctttagaggtgtcaaggtagatgggggctccaggtctgaattgctggaattgactttctgaaagactcaattaatagtctctgaatagttttgggtgccttaatttttttgctcttttctctcattaacgtttttttttgtttttaaaggatgtaattcaagccatcaaggaaactgcatttgtcacatcagaatatcctgtaattctctcctttgaaaatcactgcaggtataatgatccattctgccacaagtctctatgtggtattgtttcctaacccctaatgcccactcctgctctacaactttttaaatagctgaatagtttgttttgtgaagtactaagttcaaataattctccagcaagggcacctactcttatgcaaagcaaaaaacaacaaaaaaaggaaaaaacgacaaaaaaccacccttgtccccccaaaccaaatcattttaatgtgtttcagaaatacttgttccaaataaaagttcagagattgggacaccttacttaaagttccattgagctggaagatttgacagtatatttgaaatcagatttgatgaacttgaaagacattttttattcttctttccagctcttagttttggaacagaatctccttctccttcttttaaaattataccagttaaagtttttgatacatctcacattagcattaagaggacaataatgcattttgccaagtgagaatctttaattgcctagtaatgggtgtttcttattcttggacggttaatgggtgtttgaatttacaaatgccacttttttctctccagcaaatatcaacagtacaagatgtccaaatattgcgaagatctatttggggatctcctgttgaaacaagcacttgaatcacatccagtatgtatttttaacaaaccatatttctagcatgaatggatttgttttgaaaatttctgaagggtcaagtagtactagaggactaatgctaaagatcttcatatttatttaaattctttggtacggaaagcttacatcatgcttcagagggatgtaaagagacacaaaataaacatctggttcaatttcatttggaggatctttgggtcttatggttttcagatctcagtcttaaagtttcataaagcacccaggccaagagtccagattcaggtcagttgttctcaaattcagttacatgttagaatcacctacaaaactgttaaaaacacctgtgccagggccccacttggagactgatttaattgatgcagggtcagccctgagcatggtgttttaaaagccctccaggtgaactgtatatgcacccggtattcagaacccatgggaggctcatgctgtggaaagtgccctggattgatgtcacgacatcctgaagttcatgttcctaactccaaaataaatcactgagtaatgttgcacatacatttttgaacttcatgttaaacctgctaatttcttcataaagcaaagaacattaacctgtgctccatagataggctttatgagatctgtgaattcattctaattgcatgcaatttttttgtatatactcattctagagagttaatcacatttttataaggatccatgacctccaagagattaagatccacaatcacaagatgttatgagctccaaggcagctaatgaaatcaaagtggaaagacctgctattgacagcagcacctgatgggctcaaacctggtagcatgaggtagtggcagaagaacatcacagcaaatgacagcaggaaggtgctttgtgctacatgtaaacactttatgaggttcttttcagaagtgtgtctatgggaactgaaaaaaaatatgagagacaaggatatctgtatcctttgtcccccttccttcttccctcgaacttgcagaagcagttgctgcaggtgacctgcccatatccttgcagtgcctcctgtttccctgaacactggcctgactttccactgccaacatccacagctttttgcctgagagtgagctctggtcactggagcctgctctgccacacatgaaagaccagcagtgccagggaattatcacccctatcccatgcttcatccctcccgaggtgggataaccctgagcacctgctcttctctgccttccagggtttcccagcaggatcgtgctccagctggctgcagtgataacacacccttgatgagctgcctgtcttctttttctcactttcccacacctctgttggagtttccttccaagtagacgacctggtgcaatactacttttctctgaggctgattttaagggaacccaaactaagaaacagctctgatttattttatttgtttttacctaggccctccatttatctttctgattaggttaaggtgattgcttttgtggaaagttcactgtattcttagtgaagtgatgtgcacatacttttaccagctgaagggtgtccaggttcttggcatcttgaacaaagaatcggacaaaatgcacaaacaaagcaagggaagaatgaagcaacaaaagcagagatttattgaaaatgaaagtacactccacagggtgggagcagcctgagcagaggggctcaagagccctgttacagaattttctggggtttaaataccctctagaggtttccattggttacttggtgtccggtctatgtaaatgaataggatgaagtaaagttataaagtcatttacttggtgtacatcctttgtaaatggagaggatatttcctgtcatagctgaagtgtttccatttgatttagttctaggaagtcagcatgaataggccttatattccctgcctcaagaccctattctcctttgaatacaggacaggtgtctggggaagcatgggtaatataaatgggaataagacctgctccaaaagctaaagagctttcaaccttgggagtgggagcaggacacaaatgtgaacacataactagaaaagaagatggcgtatggtgctttatttgttggaggtgtcctggtacaagagagatcactggggaatgggccagttataccacgctgctggaaggaaacagcatttcaacaaagggttttatttgaggcaagacagacatatgagtgcacagtgccttacatataataagtagtataaaagcaagttttgaaaatgaatggatgggtggaggggtgggtgggtgggcatatagagagatgggtggaggaatggggaatggaagactagatacaggacggttctgtagaccagaggtgatagcatacaggggcacctcctttgcagatataaatctaagcaaatgatgctgtagtcaagttcagattccaggaattggaacaactcccttcttgattcccttatcaaacctacaaaaccacaaaaccacaatctcaagtgttgagggttgggtcagcctactcagcagacaggcttactatacagcctgacacttggggggatctggggggcctctcacttgggaaagctaattctgaacccagccatcacaattgtcccttgcactttaccagatacttaaaaggtgcaaggccctctggggagcaggaacccctccccggcacatcccaggccagacccctgctccactggggaggttggagcagctctgcacacctctggaaactatgtggatttcaagtttgcagcactagtctaaggaaaagctcaatgggtgtgctaatttgggttggggagtgaaaacagaaggctgtgccgcctgccatctagtgggtgttgggttgcatcactcccaggcctcccaggctcctcctggactgggaaggagaatggagaagcacagcccttccttaattcagctctttctgtttctctctagcttgaaccaggcagggctttgccatcccccaatgacctcaaaagaaaaatactcataaaaaacaagcggctgaaacctgaagttgaaaaaagtaagtgaaacacacacatttataatggaagcatacataacatgtgtggacatttcagctgttgagaattcaatttattttaaaaccactgatttttgggggaagggtgtaggggtgatgttacaggtacttttcagagcaagattgccacatttccatttaaatttaatttccatatcaattaattcatgcagcaggaaaagcatatctatatattcaaatgccagaatttggagagggcccaaggaaaattgagaggaaagtagaagcattttagaatttctcaagatataaggaaccagcattttataattttatacactctaaagtcctcataagtttcccttttcagtttgccccgtgctctatacctatctagggatactaggtacatatgagtgtgtgactgtgtatatgtgaatagagagatctagagacaaatgattttatataaacatgtttccttttattctcccaggatgatttccttgaaaatattttctttcagagtatatcctagttcagtgaattaatggtatcaaatattggcatgattacacttcattttccccccaagtattctaaatgaaaaattttaaattatgttaatgacagtttattttattacaaaagcaataatgccatagaaaaatcaagacaatgaaaagtgtaagaaagtaacagcactaacatatattatacacgtattcatatactatagacacatgtacgtaatgtacatgtgtagatatatacccacatttttaacatgactgagatcatattaatgatactgagtttaaatttttaaaatttaaccaagtaagtatacttacatcagcaggatatacatctacatactaactttaatcctaatgtatgaaacactatatagaatttaatatatatgacatagaattgtatgcatttattatagcatgatgtaacgagtcccaagttgatggattttcactactataaacatgcttgaatgttattttgtatgtttgtgcaaccctctccttgaaatcaattggtgcaattagagttattcagccaaaacgtatatatattttatattgtgatatagtttgttatgctttcttttaggaaagttctaccaccttagactcttcaccagtcatatatgagagtgcctgtttcccaccaatatccttaatgctggctgttggccatttttaaatgtgtgtccaactcatagaaaaaaattggtaccttaggggtttttttatttgtgtgtcttcaataactccttttttgcatattactatttgtggtttgtccctatgtgttttcccatttttattattttgtttacctttatctttctgacttatagaaaaattatttagtcttattttgtatagtaggatataatccccattaaatcagttgcaaatattttttcctgaagttttgttgccaacctgcctattttctatcagttccccataactgttcataaaccttggtctgtgccagattctccaaattatgggcttttgttatctagccttaaatccttcacgaggactgaacctcctctcaaacttggtgaccagaattttgggcatttcacccatgtccccgcaattcttcatcatgtgtatataaggtggttgttgcaggtttcttacaaggtcgagaccaccaggaaatggcgagagagagaacactgctgaaccttagaaacatggtgccttggtgcctgaacattctatttcttctctcttttcacgtcctcctcagtgtcgatctcaaggcctagggtttgtatgttacctagcatctgtcaccatctctttgcgtgtttttgctaacagaacagctggaagctttgagaagcatgatggaagctggagaatctgcctccccagcaaacatcttagaggacgataatgaagaggagatcgaaagtggtgagctgtttgcttttattttaagttacatgctttgaaaatactttttaaataagaaaaccaggctgggcacagtggctcaagcccataatcccagcacttggggaggccaaggtgggaggattgcttgagcccaggagttcaagaccagcctgggcaacattttcgtagagatgagaccccatgtctacaaaaaataaaatattagccagacgtggtggcctgtgtctgtagtcccagctactggggaggctgaggcagtaggatcccttgagcccagaggttcaaggctgcagtgagctatatgtaatcctaccactgcactccaggctggacaacagactgaggccttgtttcaaaaataaatgagtaagaaaaccaggaatttctttcagaagacccttttatataataatgccgttttaattcctcatagtaatattttggtattcttggtattttgccaaacacttcccattttttctggctactaaattttaatggccttgtcatctcccttcctattggccattcagctattcagcagaaattcttagccagagaatccctgaagcacttgctgtagtaggcagaggaagcaatataaggcacattttgtaatccctttgtatagacaaaaacatgaacttgagtctgttaatgatgagagtagagaggcaaataatttaagagaccctcaggcaaatgattggtttgtctccacaaagtgaactagaaactaaaagccagtattaaaatttcaagttcaaattccttcaaataaccagctcaccagaattatctctgtgtagctagataattttaagaaggcagtcttgcttaaaatatttgagtatgtgctattaccttctcttttactttgatcacatagcaacaatcataatgttcagttgtaaatgggtcatttgagagtttggggatgattttagagaattatttgtttgttatgtttcatgagaattgatgaacgaaatgacaaggacttgtgttggttatacaatgccttggatttatatacaggcataccttggaaatattgcagattcagttctagaccactacaatgaagtaaatattgcaaaaaaattattcacaagaatttttgtttaccaatgcatacagaaattatttacactgtactgtaggctagtaagtgttcaataacagcattatgtccaaaaatgtaacttaattaaaaaatacctattgcttaaaaatgctgacaattatctaaacctgcatcatattgaaatctttttgtggagggtcttgccttgagtgatcagggaggcagttgccaaagattgggttggctgtggtaattttttaaaataagacaacaatgaagtttgctgcatcaattgacccttcttttcacaaaagatttctctgtagcatgcagtgccatttgatgacactttacccagagcagagcttctttcaaaattgaagccaatcctctcaaaccctgctgtgatgccttctcaactaggtttatgtaatattttaaatcctgtgttgtcatttcaacaatgctcacagtatctttacctggagtagattccatctcaagaaaccaccttctttgctcattcacaagaaacaactcctcatcggtttaagttttatcatgaaattgcagcaattcagccccatgttcaggctccttttcaaattctagttctcttactctttctaccacctctgcagtgacttcctccactgaagtcttgaacctctcagcgtcatccatgggagtctcccaaactcctatgaacgttgatatttttacctcttcccataaatcatgaatgttctttcttaatagcatctagaatggtgaacatcagaagcttttcagtttactttgcccagatccatcagaggacattctcttttaggaaagctagacatagagctaaaaatccaaaagttggaagaattaactaaccttattcaagactccttaataaagactcctgactgtggaacagactttataagtgactcagttgcatgtccagtccttgggtttgacattactcccagagaaaagtcataatgactgtactttcatttgttttatgtggcagggagggtctaagaggctaaagatatctgatactactcagttgatactcgttattatggtcatctgttactatgcaataaaccatccccaaatttaggggcttataacaacaccttatcattttctgtcataattctgtgggtcatgtgggcttaggttggtggttctcccttgggtttctcctgcttttgtcagcagatgacatctggggctgactggttcccttgggtgggttatcccggacggcttactcacatgctggcagtggatgctggctgaacgctgggagctcagctgggcctcactgaccatagtatccctgtggcctctctctgtgacttgggcttctcatagcacgatggctaagtcccccagatggaacatctaagagccagtgtctcaagaggcaggaagcagaagctgctaaattagttaagagctaggcctggaactggtgcagtatcacttcctctatgttttattcatcgaagcagtctcagggcccatccaagttcaagagggtgagtgagtgacaaggtcacgttgcataagagcacagaggagggcagatgatacggcagctgtctttggaaaatatagtcagccgtgatgcctactatattttttcacatgtttttgcaaataataaatctaaacaagatttaagaaaaatatatttatagaactgtgtttcaaatggtcaagaaaatactcctaagatacaaaaaagatgactattcagtaaaaccagttcctttaagttaaatttcatagatggtaattaaaatatgtaaggcattactgatacgataatccagtaaaacaaactgcagaaataatggaataaattaacaagaaaacaatgttaataataattactaccatcgttgtaccaacagtggaccaggcagcttacattatggccttatctaacctgtatacagcctgatgaaatgggtattattattattattattatttttgagatggagtcttgctctgtcacccaggctggagtgcagtggcgcgatctcggctcactgcaagctctgcctctgaaatgggtattattaaaccaatttttcagatgagaggactgaagcttagagaggtaacatattttgcacatgatcccacagcgggcaaccgattgcactaagattcaatcccagagctacctgattcaagtcaagacttttgtacgttacagtactgccctttcaattcacaggaatatggtgaaaacatagatatgcaaaaatacttttttaaaaaggagaaagaatagaatgaatgaaagtcaaagatgtgatgtttcctaaacacacacagtcatctgaaattagcatctgtatggcttcatgtattattcttaaaggtgctttcccaccatctacatccatatggtaattattcctccaggcagaaaaatatttgcctctagtgactcccatgttattccaaaatatacttgagatttgggttaagtcttaacagaaataaccacatgatttagtatccacgtaggaaagtacctaaggacagaatcatccacctagatggcacaaggctcctgtttcacctgttatgtgtgtgattcttaggttgcctcagtaatacttggctttggttctggtcaactagtcggctataattaccttagtgccactgtatgaatctactatctatgtgtggctagagtctctaatttaaatacatcaacacagcaggcaaggggaaaccaagcatagttcaataggggaggcctgcctggaggctgtagaaaatagaaaaggctttcagtcagtgaaagcaggtgcccaggcattaggctggatttagattcagaaggacatgtggctcccaggataggagacaagtagtggagaatatcaaaattgtatgtggttataggtgtgtctgtgcatatctgcacactcagaaagtgatcatgtattcatacaattctcttaaggtggttagtaagtctccaccacttgtttggggtatgccccttgccttcaagtggtttacatctgtattggcagtttagacataaattaaattaaatgaaatgaaattaataaattaaatgaaaatttaatagtgacatgagaagttttgaaatcttggttactgactgtaggtcatggaaacctagtcctggaagaactgtgttaagaattcaagagacaggtagatccattatcttgctgtgtgatttcagacaagtcaaatcatatctctgcatctagttcctcgtttataagtaaagacagatgctggattagattattttaagatgtattccatttcctcaaatccttttcttcctgcctaagccttacaattacccacttgttgttgttgttgttgtttggattttgtttttttaatcgtctgcctctagaatatcccttcatcagaattgttagctccagaagaggaaggtggctgtttctttccctcaccctcttcctgtgcctggagagatacttcacaaaataaaacagtctatctagaaattctgaatccagatactaccagttgaaagataccactattttattatgactaagaaagaaaaagtagtttccattcactggaaaaaaccgtcagttgaagaacacactacaatatcagaaatattaaatcaaaaaaagtacatcttagaatcagtgaaatcatttttcatttactcctgttctttcattctcctttgtacttttaaacatgctttaaaaaaatctatctcattcttatgggtctactcatttcctttctgaatttctcagaaattattttagtgggtttttttgttttgtttttacagtaacgttccctcatgccctgtggtgtgaccatgtggatttatattgtcctcatcctgatgtctgtgggtttctcctgatcctggctagattttaggcaaattctttatctgggaattactgcaaatagtgattgtgtgaatccaaatctcacctcagcatgttgcacattttccagcaggtacttcttttttttccccacgaacatcctgggtggattctggcattcttgtcactttcctggaccaatgaacacagtgtgtgtacttcctttcacagactagaccacgctccagggacaccagctttatttggcacccacttccacttctcctcctacctgagcctgacaaatgagccctgagcctttgaaacctatgctaggtttgacaaatagtttgcaggagtagcacaatccttctgaggcctttcttttttctaccactccaagctataagtcattatgcccataaaattcaagtggacagtttagtctctttcaaaattatccgatgtatttgttttcttgcatcttcttatttgctcttgatgtcatgaaagatcaaaacacctttttatgagttatagatattcctgcagtgtttgaggctttcatttttagaattagtatactagaatagaagtagccatccacttaaaaaaaatttattaagcatcaagcatttcaaaccacattttaggagcaggagaaataatacataacaagatgtgctccttgacgttgaataggtaagagtttagtgagagttttacttgaaaaaatactgcatatatcaatgtccccattttcttttagcatcctttttctctaaaagtgcttatgttctacccaagattgtgaacaaggtctgactacttggcagtggtttggtgtcatggattttccatttgtctttcacacagctgaccaagaggaggaagctcaccccgaattcaaatttggaaatgaactttctgctgatgacttgggtcacaaggaagctgttgcaaatagcgtcaagaaggtcagagtcccctttctttcatcactctcaagaggtagcagctgttatttatgaaattttggaaatgtgagaaccacaagagaataaagtaacctataattccccttctaaattgcttaggatacgagtctgtgctgggtgaccagaacttgacacatacacaatattaaatttaaaaggacatttaaattactcattagtcagggccagtgttaaccactacccatttggccagtgtcctctaaatattatcatttattgtgttattgcagctggggagggagaaaatgacagcatcccaggggtaagatttaatcttgaattcatcaggaaaatgacccctgaacatcccgagtctagccctcatttgagaactagtcctgctaattatataccttccccgtaaagtacagtaagcataaaaatgtttccagatattcagccaaggaaaatagttattcatatacttaccttttatcaggcatagtctaggccataatgacctaaaagtgtaaaacacacttgccttctgcccttaggcagctcatggccccctgtagtttagggaaagggatcggaaacagcaaacaagcaagtattcaaataactatataattacaacttacggtgagtgcaattatgaacataaacacgaatgctgaagaataatgaagtagaaagaataaggaaaccagaacgcaaagggtcaagaggaattggccatgcacagaggttgatgaatcactttccatgcggagggaccacagtaacaacagcaagggctgtgagtagagtggcttgagtgagggtggagtgagacgagatgaggcaggtaggtgggaactgggtgatgtaggattttggaggccattatgagaaattcaaatattcagtgaaatgtgacactactgaaaaagtttagagaagggggcagtgtagcctgattcaagttttaaaagattgctgtggttgccatatggagactagtttaggaggaaacaggagtggaagcaggaaaagcagtgaggacaggctgctgctctaggccagacgagagtccccgatggtcaaaccagacaatgcatcaaagaggactgagtggcttcaagacatattgagaaatgggacagcctactgatggatggaatgtgggaatgagagagaaagaagaagtgagatgaccctctagtgtccttgtttgaggaactgggtaggtgatggtaccatttactggcatggggaagaccgaaagagaaagaattcaggagtttcaaatgggatgactatttgagatgcctgtgaagtattcaaggggaggtgttcatatagcattgccatctgactctttctctgggttcatttcctaactgtctaactttgggtaagttacttaacctctgtgtaccttagtttcctcatctgcaaagtgaagacgataacacctatttcatggggtcactgtgaagagtggatggtttgtgacatgtcaagagcttagcgtggtgcctggtacatggtaactcctgtaaaggtattagttgctggtatattatcatccttttcatctttatcattgtcattatcctcatgatcactggcgtcattatcacgcgtatatagaagacaggttgagctagagatacaagttgggagttcaaaagatcgtatttgaaacaatggaaatactgagatgattcacaaggaaaggtggaaaagaaggcccaagtggagccctagttaaaagtggagccagaaaagaagagcaaggtatggctagagaagtaggagggaaattaggcagtgacaccaagaaaaccaggaaagagaacagtgttaacagaaggactgagtggttgactgtagaatatgttaaaaatcttagacaaattaaatttaacagagtttagttgagcaaaaaaaacaattcccaaattgggcaggacccaaaccagaagaggttcagagaaactccagtgcagccatgtggtggaagattttttggcagaaaaaggaaagtgacctacagaaaacagaagtgaggtacagaagcagctgtattggttacaggcttatttgccttatttgaacagaggttgaatagttggccacctttgattggctgaaactcagtgattggcacatgagtaggttccagtctgtttacacacccattcagtctacagtttactatgtgaaagtttatgaaaaaacctttagaataggtaaagagacacctttaggctaaacttaatttaacaaatgctactgactgattaagtaagaagactcaagagtgtcctttgggttgttagcatggaggtcgttggcaaccttaaagagacatttcagtggagtgccaggcagggtggtgacactggatcacacagatatgaatgactagagactatgcttttgagaagttttgatgtgaaggggagcaagaaatggactggtggccaagggcacctgaggagtcaagggagtgttttctttttcggatgaatgaatctggagtgtgtttgaaaacttggaagtggtgcagtagagaggaagagattagttttgcaggaaagagaggggataactgcctggaattccttgaggaggtggaagagggtgggattgctgtggtgcaaaggtgtggcccttcacaggagcaggaacacctgattagtgaagacagtggatgaagatgcaggtaggcagatacatttggtgataggaagaggggagagtatttgtctgatgagcaaagccaaaggaatattgcctttacacactatcttttctgatatagggaattgtgactactctgagaatattgaacgtctattaagactcaagagtattgttttaatacaaaaattagccaggcgccatggtacgcgcctgtaatcccagctactcaggaagctgaggcaggagaactgcttgaacccaaaaggcggaggttgcagtgagccaagattgtgccactgcactccagcctgggcaacagagcaagactgtgtctcaaaaaaaaaaaaaaaaaaaaaagttgctaaagccttcatcaatattgtcttagtgtcttagtcagttggtgctgctatcacaaaaataccattggcttaaacaactgaaaactatttgtcaccattctagagtctaagaagtctaagatcaaggttccacgcaatcagttcctaatgtggggggccttcttcgtgtttatgtcctcatgtggtggacagagaataaggaggcaagctctctcttggcttggccctcatgaccaaattacctcccaaaggccccatcttcaaatgccatcacatgagaattaaggtttcagtatatgaattggggacagtatggggggctgcaccagcaaacagtccataacaaatacccagacatgaatgctgagttactcaagagtgaccattcatgctgcttttcctaagccccatgactaaagcactaattaaataattataataaaacatctaagtaggtaaagactgtccacgaaggagggaaagagcattaagattagcccttctggtgcataaaacagtgaggccatccatggctttttgtcatcagtaatgtcccaccttagcaaataaatagaataacaagtttacctacacttatttaaatatctatgtatgtatggctaataaatttggaattttgccctttagagaagtaaacaaattatttcctttctctaattaggcttcagatgaccttgaacatgaaaacaacaaaaaggtaacaaaataattcccttgcacattttaaatcagatgcatctaatttaaaaaatcttcaaaggaaggaatcagttgtggtgaaaaaatgattaaatcctgataaaaatcacaaaactagggcagatgagtaagatgattttctaaaagtaggtatttaatgcagtaaggcattttcttcactggaattagagatttcattcctgcagtggaactacatgatcatcagcatattgaatttgaaaataaaaatgagtgaataggtcatcaaatccatattatagcataatagaaaggatgatcttagttcccactacattgacattctggaagatcactgattaattttacactgcataacttctaagagtattatttgatgttattagctattggccttattgtaggaaaggtaaagttacattttcactttctttcatcctcttcaaagttcttcaagtgatcacagtggttttatttagtaagtatttatggtttatcctacaacagtgaggctgacagccacaggcagaagtttgcctaataacttcattctcatacttcagaggttcggaaaatactgccttgctgcctgtggggtcctatcctatttgaagttgagatcgtatcttctcaccctctaaatattaaacttgaaagaattatgaataaatatggtcgcaggcctgtcccaaaatatttgtgagtacattactctcttgttctagaatttcataattcataatttgggtcaacagtatacagattgacatttggtcattgtcatttattagctaagttattttaattctcaaggcatcaatcttctcatgtggtcagtgggtaggactctaatcctcactacacatcacagacagtaatgagactgtgtgtgcaagaactcatcctggtgctcagctcatagcactggtggtatttattattattaaacacacatggaaggaacggacatggccgttgtttggtgggggagcaggaggacacattaagaaaatgataaaaacaaaaacaaaaccaaattacattacttgattattgtttcaggcttttattggtgaaatcagtttgataatttagaatgctcagattgttaagtgatcagttaagacaaacaaattgaccatttttttttttttttgagatggagtctcactctgttgcccaggctggagtgcagtggcgtgatctccgctcactgaaagctctgccccccgggttcacttcattcgccattctcctgcctcagcctcccagtagctgggactacaggtgcctgccaccatgcccagttaatttttttgtatttttaatagagatggggtttcacagtgttcaccaggatggtctcgatctcctgacctcatgatccacccgcctcagcctcccaaagtgctgggattacaggcgtgagccactgcgcccagcatctgaccattttttaactcatggattacatcatccaactaaggaatttatccaactagattcactttatgcaggaaatttagctttgcaaagttctcagcaaaaatattgatcacttttgaaggtatttttgttgttggttttattgttgttttttctatcaataaataaactaatttgttttcttttttctgtatgcaaagtaatgcagtttcaatatgtcctatgcagcaagttattaggttacttttaagattaagtgctttttaaatactataaaccacgtatgtatgttgcttacattctagagtgctacagtgaaacatagtccccaaagaggcagcatcattagcacctgggaactagttacagcaatgactggcctcactgcagactcacttcaacagaaactctgagtgtggggcccaggaatctgttctagtttaaaaagtcttccaggtgattctgatgcacgctaatgttcgagagtcactatttttgatgttgtgcctcaatttgtaaaaatatgatgctatatctatttcatagcattgctgtgaggtccaatatagtaatttctttttttttttttttgagatggagtcttgctctgttgcctggtctggagtgcagtggcacaatctcagctcacctcaacctctgcctcctgggttcaagcgattctcctgcctcagcctcccaagtagctggaattacaggctcacgccaccacacccagctaatttttggcatttttagtagagatggggttttgccatgttcgccaagtttgtcttgaactcctggcctcccaaagtgctggattaaaggcatgagccaccgttcccggccagtaatttcttgaataaagtcccttaaaaatctaaaaatgtcctacaaatgtaagataagcttaatattttatgattacctccttttgcattattcagagctacaacagacactaacttcttaaagtatcctttagcataattgaggaagaaaaagcctttacctttcaatttgtgtgtgtgcaattatctttattaaggaaatctgcagcacgtatccgtgggtcctactgaagtcatcaacttatatgttttcttccttgtgcttgtagggcctggtcactgtagaagatgagcaggcgtggatggcatcttataaatatgtaggtgctaccactaatatccatccatatttgtccacaatgatcaactacgcccagcctgtaaagtttcaaggtttccatgtggcagaaggtaacaccaaaggttaaatgcagtcgccttttttgcttgattttcttttatggtgctgatgagcttttatctaatttgttgccatttttctttgtgggcatgggggctgttccacctcaccttatttttgtttcacagaccatagaagccaccttggtatgtggtgacattacattgtcattcacgacttcaaccacaaggtggcgatgagagactatggatttgttagtgctgggcatgtagcttcttctgttcccaagtgcattcacaagactccttttaatcaaaagctggttttcaaaaaaacataagaagtatttaaaaacttcatttctgggctagagaagccatcgtaatcatcattatcatcaaaaattcatatttcggtggtggctgaaaagacagatgtctccatccacaggatgtcaatgaaagtaggagctactgacatgataatgtagcattagcctccaaggcctcatgattcagggtgtaattgcatttatttattgctgtttttcggtgagggtttgatggcagagttcctgaatccatctttgcttttcttttacagaacgcaatattcattataacatgtcttcttttaatgaatcagtcggtcttggctacttgaagacacatgcaattgaatttgtcaagtatccttatgtatcaagtggaatgagtggttgactcacgttggtttggcaagagcctctgaaatagataaatggctaatatctcattctggtggtggagttcataaaatgatatgtgggaaagaccatggcagctgtgacaatctgcccaaatgaaaattgtttttataatccacacagtgaactgtgatcttaagcatcatttgtaaatgtgaaatctgctctgtgctgtctacttgtttgtcattgttggcctagacctttgttgttttagctctttgttgtttatttttctctgctgtaggactctttttttctgttttccttaataagttacagttataacaaacggcaaatgagtcgcatttaccccaagggaggccgagtcgattccagtaattacatgcctcagattttctggaacgctggctgccagatggtttcactgaactatcaaaccccaggtaggagctgatgtccagtgaccccaaattccatgagaacactttgacaggatggtgccagcacttcccatcagttggctgtgggcattttttaaaggaagcagacatatggcaaagcaatgtgttattggatttatataatggtgagaaataaaaaaaaaaaaaccaaaatagagcaaacaatggtagaagataatgtgttgtgattggaatttaattcctttcataaatgccatgactattcctgctaaccattatcccatattccaaaatatttctcatttttcttccttttggatcaaagttgttatctttgtttccagaggcagaattaagtgaaaagaatttgagtatctttgtacagtaacagcgactcatttctcctttggcaaacaccctgaccactgtgaacattcagcaaatatgactgatgcaggggcacttcactaaacaaatacagaatattttgaagtaaatgccactaaaatggtatataaggagttacatatttgaagaggtactaatctataacttggtcctccaaagtgtactcaaagtcaggtttccaatatataatgactttttttttctggaaggaaaagagtaaatttttataattgataaacacatttttaaaatttttgaggtttgcttaagagcctaggatcacagtatcaagactagaggtagcaaaatagaaatagaatagatagaaatatgccacaaaccctcttcactgtagatggtcaattctacagcatggttcttacaactggtaaaataaaacaaaaccagaaagctcttttttccttcaactctttgctattaagagaactgcccatgcttcccaatttgaggattttttaaaatctattttgtattttaagaatccctgtcacttcgttccctgctatgtggattgagtggaagatcctttgactttcattcctttggcatgagtgtgagctgactgtgcttctcatgccttgaaggagcctccccagtgaccagaagctcctcctactggagtcaccattctgcatggggtccccacagtgcttgctaggttagactgtgacgtgatagctaccaatacaatcctgagtgtttctagctggggcccagtaacaaggctctgatgacttcacttacttaaaaaagcccaacttgtgttctcagttgtcagtgagtccataatatggattaaatggctaacccagcttatgttttattctataatattaggtttaaacacaacattttgaagaggaaaaaatatccatcagtttacccatttcttttgcggatgggaagaaagaaaaaatgttattcacttgcaagacagaagtcaaaagccatgtgctgccagtgtagaccccactagagtaattccccctgcctcccatcctggaagcatgccaccaagttttatgcgatacttacctagttcattttccagtcttttaaatcaagtttcatattcaccctcccgggtatctccagggttcctctgcccagggatcctgagacccatcctctcccactgtagcaggttggatatctctactctcaatactcatcaaacaatggtgtgactcctatattgaatccagttttaaaagtgacctttagcatgatctttatgaaaacacattttatgtttaatttaaatgaaacatgaggtcaattcaacatggaagagagtatgccttaaatagaccaagcagaaccttgtagtattaaagagggacctgtgggcctaggagcaatctgatacctattgtttcaaatcaccccgtcagggtcttttttgtctaggaagacaagatgctaaattatttttgtctcttgacagatttagcgatgcaattgaatcagggaaaatttgagtataatggatcgtgcgggtgagtaatatgatttaaactgttttcacctagattgagaactccatactacagctctaatgaagccatgtcattttcaattaggggctacagaatttaagctgggtttgagggatggaatagaaagaaatgaaatacctagagaatatttgcacatatacattcttcatctaccccattttactaagcaggttttgggttttttaaatcacaagtgaagcagttcatacatatgctacagtttaatcctctcactttaaaatcaatagtggaggattttatgtctgggacaggtaataatccctgcacacttggacattaactggagatgtaggcattaaatatgtgcattttacctaggacaaatcaaataatgaagttaatttcatatgtaatgaagttgtgggtgtcgagctgaatttcattcagttgggaataaacctttgtcctctactgattcttttttgtgtcttgtaagtagcagttatcaaagaataatgctgtgaatattgtcctagtttccttaaatagcactcttgaaaactgtgaaccaagaagtgaaataggaaatgttaattctacagaaacactgaaaggttaaatgaaaatataaaattagaattctcttgagataaaaaaaaaaaaacacaactatgtggtcatcccctcaccccacctcagcctcatgcatctgtccccaaacaagtaaatattaataactccagaccactgcccaaaggcctctagaggaatccaatggaaaactatcccgtcataatgatgctattaggaatttcttcatggtggctcacctgattggatatctttttatcactgaacactgccagtcaagataacatttttcagtggttgtgagttaggaatgacttttcagcatgcactctgcctccctctgccagcctggtgaatggttctctgccaatgtggctgcaaacacagtgattatgctattccccaaatcacccaccacttacatacctggagcatgccctacattttcctctgctgtgtgctttggaagaaaataaattgtgtagctgggaagagaaagatctgaattcatatttcagaattttgtgaaagcaattttgttatttaatgccaagtgttccaacccaggagattttgcgcataaattgctttgtagacctcctcctctcccaagtagtgggccaaggcatcaagccccaggggttcagccctggactgtcagtaaaagccctaggctgggagtctaaagatcagggtttgagctcagctcccagctgctcctagttcttgctgtattgcctagagcaggtgtgttagacccagagcctctcttctctgcttgataaaatgaagacggtgacacctgtcgcacagggtttgttgtactcaaaggaaaaaaaatgtcttttttctagaacgaaacagggaactgaaaaagactttgtcctttgacaaaaaccgagtcctttctgatgagacccacctttgggcttccctctcagtcactgtagaatccagtctgagcaacaatcgtgctagttcagtttagtgaaaatccccagcccttggtatctgaccaccctggatatcctgtcactttggcctgccttcagcaataatcctatcaagtcagtttggccagaagtccttatccttgatgtttcctcatagtaattttccatctgctggcgctcaccttactccatggttctaaatctccatgtacgcttgttggggtaagggttgagcccttatacctatcaccatggctccctacccctttgaataaagtccactttaccatgtttaacaagtgtttgtgtacatttttttctttaacagtttacgacagctcagtcaggttgaatgagtgtacgaaagtacttcaggaactgcacatttctgtgcaaaagtgagatttaagaaaagcttaaggccttgtgatcaatcacacacacagacattgcaaaattcaatgagtgctctgttcagtcgtcctttaaggaccccaaggagtcagcctcagcactcctggctcttacaggacccgtcgggcatggctgtgctcacttctgaaaacttgcagtggcccggtgatgcttgaagcactttcctcgcccacctcagcgatcacacctaagatgccatcagctgtctaacatgccatgaggaatcctggcagcctggccggatgcagggagtattgtttctgtataaaaaaaatcctgacggctcggcccagtggctcacacctggaatcccagcactttgggaggccgaggcgggcagtggctcacacctggaatcccagcactttgggaggccgaggcgggcagatcacaaggttaggagatcgagaccatcctggctaacacggcgaaatcccgtctctactaaaaatacaaaaaattagccgggcgtggtggcgggcacctgtagtcccagctacttgggaggctgaggcaggagaatgtcgtgaacctgggaggcagagcttacagtgagccaagatcgtgccactgcactccagcctgggtgacagagcaagactccatctcaaaaaaaaaaaaaaaaaaagtcctgacaatcctatgttgtttgtttttcctagaatttctgcttagccattattagcacgtgcagtgtctcactctctccaccgttatttattttttcttaagacagggtttcgctctgtcacccaggctcaagtgcagtggtgcaaacgtggctcattgaggccttgacatcctgggctcaatccatcctccctcctccacccctcaaatagctaggggtgcccaccaccacacatggctagtttttttatttgtacagatggggtttcaccatgttgcccagactggtctcgaactcttgagctcaggcaatctgcctgccttggcctcccaaagtgctgggattacaggcatgagctactatgcctgacctcactggtcatttgtaaatgcgttcatttattttaaaataccttcacagaaaaggatactgttgctactttagcctgaattctgtgctgatgtgttggacgctatgtgactgaaagcatacacctcaccagaaaagctgaaaaatagcctgtgcagtggggcagcccagcttgataaagtatcagcgatgctgttgactctgtaatctcctaattccccttcccatacacccagctggtggcaaaggctgtcagtgacagggaaaagagaagaaattgccgtcacctgcatgcctctgtgttccatggcgatggtagatgtggggcccggtgctgcacaggagctcctgtcactggtgctcgggcactgcatggttctcaccgtgtcacccttgtggttctcccacccacctgcaaagacttttaaaaactgcccctttgggctgagtctgaggactgcatttcttaaagaggcattctgtgccctttaggcctgtggaggcaaagaatccctgttttatatagaacatcagtgtgcaaagtacacaaacacccccaggatctagcaactgtagcaaaacgtcagataccctcctgggaaaaccctctgtgctccctggctgatcttgtgggaggacgcaccactgggcccaataagtgtgaatgttaccaggaaagtgagcagtgcttttaacagtctcgtttttgaagatggaaaaatggaagacatttccctaattgcaaatgaaacaaaatagtgtaaattaatacctaaaatctttttagactttcataggaaagtgagtgattgatatcaaaatggtatgacattttatgattcagaggctgttttttatacagcatttctcccttgcccacaggccgtacgttctaagaaccccagtggatgcctgaaaccaccaaacccaacatgtattatatatattgtggttctacacattgcatacctgtgataaagtttaatttataaattaggcatagtaagagattaacatcaatgactaataatggaacagttataacaatatagtgtaataaaagttaggtgaatgtggtctcaaaatatcttaattttttctcttttatgtttattggctatttggatattctgttttgtgaagaacttctactcattttcctattgggttttctatcttttaaaatagattttttatttcaaatttttattttccaatttttatattaggttctattttaatatttttggaacagagttgaccaggggtagctgaagcctcagaaagcaaaattgcaaataaagggggatactgtatagcatagcaacttgcagttatcatcagcagccattttgctttcttgcagctaaataaaataatggcatgttggacaactgatggcatcttaggtatgatgaaataggatgcatttccttatgaccccattttctcattcttggtgctcctatccacccacctggttagcaacccttcttctctccctcgcttgccttccaaggccttacacagtccacagaaaatccttggatccctgtcttggcattggctttggccttgtgcctgtgcctaccgcacagacctagatgtctggaatgagttcattttctgtaccagaaagcaccaaacagaccatctatgtcatttgcagggcccaatgcagaatgaaaatgaagggctcctgagaatttaggatggtggatgcagagcattaaaccaagcatggggcccttctgagttcagggccctgtagaactgcacaattagcacatccacatagccagctctggtgccagattctggcttcagcttccctatcaatgccccagccccctgcaccctcacagccaccagggatatgagaggcaacctctgctgctctctcagaccgccttggacccagaacagatgctcctttgaccttcaaagaaagcttgctaagtgtcctatcccaggccagggcttatctcatggtcctgacaagcttctgcatactctgttttactctcttcaagtatacaaaatgaacccatttcaccggagcatgcctgctttggagaattggatatgggtttcttgcccctttcccctgccatttctcattttggatcaattcactccttcagagatgagtgttctatgcagatttgaaaggggggatgtggaagaatgcttttgaccctgagatgtcattgtgatcccgtttcttattttggtgggtaggaagggctcttgatctttaacaaaggactgtggaaagtgaggaatctctggacactcacttcccaaggagattcagaactggaaaggtgactccagtcctgtattcatccaagtcccgaccttcctcgggaggcagaatccctcatttgccacagctggggtccaaatgctgcctgtgtcatgaaagccagacccaccattgttacctcccctcacagtctgtgtcggttttccttccagagaaagctggtgggcttccctcggagatgcaggcgtagtattgtagctactcacctactttccatcctgattctttaccttttgctgtatcatcatattttctagttgccaactctagccacaaaaaaagctgcaaatctaaaattccatgaatacagaagataatctcttctatatagagagcttttatattaatattgtgggttgcattctcttggagacaagagtgttcaaaattaccttcaacatttcaacaattgtgtaaatgtctatattcttgataaaaaatcagtgttgtctcttaaagattcctttttggactatcaaatgtaagggaatatttttaacactttgttttttgttcagtcttagaagataacaatgaatggtgactttttcaaaactaagaaaagtgacattaaactttaaagaaaaaatatcatgactcaggatcccttttgggttgtattttaacagataataaagttgacatcatctagacttgaaattaataaaagttatgcttctaagaaaaattagagatttgagttcccataattttgattcttttacatttaaaagcaaacctttacttttggaaaaaagtacttttattttcattgatgtactgctcatagtatggattctttaaatctatggttatacttatttctaataattttttaattttttttaagttttttgacacaagtttcagggaaattatggaatctgtgattatatgaccactaccccgtggacatgaggggcagacattgtgtagtgagggtaattgcagaacattttcatcgcctcaaaatctgtatcgtttagctttcatctcccaataggaattttaatctaccctctgtctctatatttgcctattctgaacatttgatataaatgaatttatataacatatggcctttcgtgcctggcttctttcacttaacataatgttttcaaggttcatccaggttgtaatgtgtatcaatactttattatttttattgctgaataattttccattgtatggatataccatgttttgtgccatacattcattcatcgatggacatttgggtaatttccatctctggattattacaaataatgctgctatgaatgttcatatgcaagttcttctatgaatatgtctttccatttatcttggttacatgcataagaatggaattgctgggtcatatggtaactctatgtttaactctttgaggaactgccagactgtctttctaagtgaatgcatcattttacactcctactagcaacatatgagagttccaatttctccacatccttgtcaacacttattgttatctgactcattaattacagtcatcctagtgtatacatagtgatatctcattgtggttttgatattcatttctctgatgactaatgatgttagacatctttttatgtgcttcttggttttttgtatatcttatttggagaaatgtctgttcagatcatttgaccattatttagatgagttattctttatgtattctagatacaggcctctaatcagatatatgaattgcaaattttttcctttttgtgactagtctttttactttcttcatagtgtcttttgaagcataaaagttttcaacagaaaatccagtgtatcattgcatgtgcttttggtatcatgtttagaatccattgccaaattcaggtcataaagatttgtccttatggcttcttttaggaattttgtagtttggctcttgcatttagttattttatcctctttgagctaatttttgtatatggtataaggtaaagatccagttttatttatttatctatttatttgcatggaactatcctattatcctgtcactatttatttaaaagactattctttcacccattgattggtcttggcatccttgtcaaaaatcaattggccatagataacgtggatttatttatagactttgattctgtctcaatgagttatgtgtttttctttatgtcagtaccagactgtcttgattaaatcttgtagcttagtaataagttttgaaatcaagaagtgtgagacacccaattttgttctctcttttaacattgttttggctattcttgatcccttgagtttctatatgaattttaggattagcttgtcagtttctaccaaaaagtcagctgggattttgatagagattacactgaattcacacatcaatttgagaaatacttccagcttaacaatatggtcttccaacccatgaaggcaagatgtcttcccatttatttagctcttctttaatttttttaaacagtgttttgtagttttcaaattgtagacacttattttttttaaaaaagtttattcctaagtggtttatattttgctgttgttatagaattgttttcttaatttcatttttgcatgttcattgtcattgtatagaaatacaattgactttttatatgtttatctggtatcctgcaatagtggtgaatttatttattccaatagtttttttagtggattccttagagtttttttttatttatgggatcatgtcatctgtgactagaaataggcttacttccttctttccaatctggatgccttttaatttgttttcttgcctgattgtttctactagaaatggagaaataatttatttttattttcacctacctctagctgaaatgtcaattacctttgattgtgaatgtagacaacaatccacagtcacattagtggtacccgtgactctctcaccaatgtaaatcacagacattgtcatatttcactactattgttacagctgtctcaaaatatttttgtactttagattattgtcatcataattagatcttaccattagatcttataatttaatgcattattacaagtacaattaatacagaggtagaatatcacatatttttatattttgataactatagctaatataattggtttttcattgttattctttgcattttattttatacatataaagaaaagtatttaaaggtgaccaggggataaaaaagttccagagaagatgataggatcaggaagtcctggataccactgaggctgcagctctttaaggttgtgcataagggcgggcacattctcttccatccttaggaccctctgcctaaaatcctagctcctgtgttacagatggagaaaaggaagcatccattgtttcaactagcgagtgttttagtctttgtaaaacctactaataaacttctatgctattgtcctaccaggtaccttctcaaaccagatttcatgaggcggcctgatcgaacatttgaccccttctctgaaactcctgttgatggtgttattgcagccacttgctcagtgcaggtaaggcccctgctcatcacaaggtagtataaatgtatacacaagtggtccttgaaagaaattataaaatattgaatgttaaattgcaagatccatgtgctgctcacaactttgacttaagattccaccccctttttaaaaaatgagacccattttttcactagtaaaattattagctacttaaagtgaaagataccatcaaaaaagtacctgctacttgattccatttatacaaaattctagaaaatgcaaattatagtgacagacagtaaatcagtgatggcctttgaaaaaagggcagggaggaatgggttacaaaagggcacaaagaaacttcaggtgatgatacaaatgtttatcatcttaattatggaggtggtttcgcagatgtgctcatatgtcccaactgatctaattttacattttttttttgttttttattttttgacactgagtatcactctgtcgcccaggcaggagtgcagtggcacaatctcggctcactgcaacctcctcctcccggtttcaagtgattctcctgcacctgtagctgggattacaggtgcccaccgccacacctggctaatttttatatttttagtagagatgggtttttaccatgttggccaggctgttctcaaactcctaacctcaggtgatctacctgcctcagcctcccaaagtactggcattacagggatgagccaccgtgcctagcctaattgtacattttaaatgcatataatttattgtatgtcaaatatacctcaaaaaagctgtttcagattgttagctagaaaataatgtaaacaaaaaaccctaataagtggctatagtcatttaaacactaaatgaaaaatcatctctccatagctttatcgtagatagactaacattataaaactgtcctagctgaccagtgtcaatatcagtaatgacagacaaattctagcttcacttttctgtgtgtctcttttcaagacttctaaaagaattcattaataagtatggcatgatggaatttcagagctatgaagggtcttaggacatacctgaattcatcacttcatttcataggtgtagacacttaggtgagatgaagaggccgtggacactatttgtattatgattcatatatattttttctttgttttttttctagacagttctagaaggtagaacatctgcttgaaacagctggggtttttttgcctatagtagttgttcgataatgttttggtttgatagaaatgaatacattattgccatagataattgaaattcctgctcccacccaaaagacagaatttcttacttcctgattattttttgctactgatgcttacacagagcttacttctctttgctctcgttcgtgctgctacaggttatatcaggtcaattcttatcagataagaaaattggcacctacgtagaggtggatatgtatgggttgcccactgacaccatacgtaaggaattccgaactcgcatggttatgaataatggactcaatccagtttacaatgaagagtcatttgtatttcggaaggtaggacattttcagcacgtcaaacttactctaataacttgggagccatgttttagttcacagacgctacacgatacaggggcacttattcaaccgacaacatcttctttttctcttctcctaatggctaacttctgtagctgtcataggatcattggttctatttggccctgccctccttttggttctcctctcctccttggaagagcccatctcctgcacagcagtgcctcagctctgggtttaccatcttttagaatgagtccttgctggtggacaccatcgtacactagagagttcttccctaccctggaagttactggtaacttacactattcctttagccaagtagtcaggtaagatgctgcactccaaaattttggtcaatagatgtcactacatgggtcagttggcatggtcctgtctctcctgaaagagtgacacctgttgcctacttgcaggtcttatccttcttgtactgttgttagtgttttatttttttctcctaataccgtatgttggatcctaaaaacaatcacagccattctctctaacgttcggttgttaatctcttattcaccttttcccttggtttattttttgtctattgaagatgcagtggaaaatccgcacaccggcagtgctgtctccaagaatgttcactttcctttcttacttactctgttgtcctgaccacaatgatttcttgctgcttctttaggcacaagttttccagctggttctgctccatttgtacatcatgcaacacagataatcagcttctttccttaacaaaatagggattatccatttcagaatagagtaactggcttacagaaaccaaatgaagggagatcaatgtaggtttgatgaaacaggccattttgacatttaagtttacgctgggatccacacaatcttcgcatcccattgtcttcttctctgcccctgtcaggatatggtgtaaattacatgcatagctgtgatttggttttttccttccctggtatttccaatttgttatagctggatccgttaccagtatggctagtgttctttggcatagtgaataatccctactcacatttctagaagctgagaaagttgactcaggcattctttgttttggatgaatgagaaaatacccagcttagtgtttatatataatagttctggcactagaaacgagatgccaattctgagtccttctctgttcttcagaagttaaatcgtttttttcattgctagcaagtgctttaaaaactttgttttctttcttgtcatttttgtatttttcactaatctcacatggcaagaatggcaaatcccaagcctctattcactgcataaggagcaagagagagggaaattggctaagttaccatggtttctcctcttcatcttcattaagctggaattaaattatagccttcagatgtaaataggcaaccagtccattgtctagctttaaacatagcactcagatcaagcaagatgtcctggttgcttttagccaataaaaaggcattcctgattaaacacattggataccctttttgtaatgttgctattttgtaactgaatcaggtttctgctatctgaactcagattttatgttcatttattccgtttggggatagcaggagtaggtgtcttagaatcaaagtatgttaatgtttctagctaccgcatcttactctatttaacatcccaacatttgctggaaactgaggagtacaagaaacaaggaggacccaaatttatgtacaaaagttatctcttatgcatgaagcatttattcagagatacttaatttatttattcagagatactttatttattcagagatactttcgtattcttaaaaacaaacaaatatagatgtcagcaatatgccagatattagatcacaggattagatccccaattcccaggccccactctgtcactgatatgtctaagatcaaggaaagtggctttatttctcatccattatatgggtggggacaaggatcaatcacaagggttgaagtggtaatctttaacattcatttcatctaacatttttcacgagataatttccaggaaacatgttccaattgcttttctcagtgtcttgggcactgtagctcatgcagtacattttggggaatgcagatggatcatggacttactttcaacatcagggaacatttaagaacagcatggatttggtccacactccttagagtcatggttcttgggcgctgcattggaaaaatcagtgaaagtcctgttctgtttgcaggtgatcctgccggacctggctgtcttgagaatagctgtgtatgatgataacaacaagctgattggccagaggatcctcccgcttgatggcctccaagccggatatcgacacatttcccttcgaaatgagggaaataaaccattatcactaccaacaattttctgcaatattgttcttaaaacatatgtgcctgatggatttggaggtaagataaacatttgggtacggaatatgatatagatgaggtcctagattataagattataaaacatcttgtccatgctttaaaaaacaataaaaatactgtctattcctgctaatgctgccaaccctgattaccttgaatacatcaagaatacatcataacctcaggtttcatagtaagaaatgaaagtacaaaacgagatgatctctaaagtcctttcttattttaaaatactataattttatgttgtttatcaatttttacaaacacattttgtgaagggtatatttatattgacaatcagactagggaaaaaaacataaataaggtgaaaccatagatatcttatcaatagtatcgctaaaagatttaaattgaactcagctatcaacatgcctgaattttcttccaaatccacaagaaagttcaatttcataaaaaatcctagtcatcaatccatatgctttaaggtaatcaatgggaggaatccaaagctagattaagtcatagaattttgcttacatgcaaacatgttaactttttatggcctccatctaagccaatacattaaaagaaagcaaagatcctctatattgtcagcctgttgaaccataaggaaatagtacagcaggatgatggcatccgattagccaagggttcaaatccttactctccactgctggcagggtgatcttgggaagaggatgtaacctctcaaacccctcatttcctcccctgcaaagtgaagataataataactacctccctcatagcattattgtgaggtgcttatcattagagtacatgatatagcaaggctcagaaatgtatgagcgcatgggggtgggcggggtgtctgtagacacagatataatttctatacttcactggaacacatcactattttatctggggaatatgggataattttgctgtttgtttttagtagtgcatgcttctgtggagggcagattttctgcaactaaaccacaactttaccagtctaatatcagagtcaaaaattaaaataagccatgaggatttttccatcccaaaattcatagtccaggctccttcctccttctcctttgtctttcataaaaaaaaaaaaggaagcacattagaagctacaacatacagtaatagaggtaacaacccataaaaagcctggaaagggatgctgtgaggctgggtaagaggatcagaaaggggcactggagacaagtggtaggtttaggagcagcagtccgtggcaaacctcagaaacctccctgcaacacagcatggtggtggccatggggcatcagctgatgagttaaatcatactccacatacgtgagcttagaaagcaggaactgtggaatacctcatacattttagaaatagttgtataaacccatatgatggaagatttagaagttttgcctctgcatgggttaacttcccactgaaactctaattcattcttgggaactaagccactcgaatagaaaagggaaagaaatcatttgtttagcttctactttatgccaagagctttatgtaaagagatccaaaagcatgaagttgttcagaatggatgtaagcatagggagatctgtgctgcagaaacatctgtatttacaatgtagcttattacccatgttgtatttaagtatttagccaaattaatctctttaatattagtcctgccagtattctttcctaacatgtcattgtggctgcttactttttatcagaagcgtttgaaatttctatgtaccattgatgagattctgcagtcgatgccttaaccagagttgacattcaaatacaatttattcaaaattctctggtcatttattttatatgtgaagaaaccagggacagacattatgcggtgtcagggacttccctgtagataacagaagaagaatatgagaactgtctttttccaaatctctgatcttctttatagcttcttgacttattcaaaatatacttatattttccctgtttagccaacctcccacattcatatctcagtgtgtttatgtgctgaaccagtgagataggaaatctatagagtctgtgttccctggagtattgatattccctcttcattccacaggaacaagttcaagatgaagctcagcaccatcacactcagcattttctagaaaaaaaaatgttttttttcccctaggaaaaaaaagaaactcatcaatatacatcattagatttatatttagctaaagaaagatagtgtggattttcattacttttttccacaaatatgcatagcaggtttattctataaaaagttaagtagctaaaatatgtatcagagagcaattctgagaacacagaggatcaaatgagggtcactcacaaatctgctgcccagagacagctattgtttacttccagtctctttttttcctgtttgtttatttatttatttgagacggagttttgctcttgtcacccaggctggagtgcagtgacacaatctcggctcactgcaacctccatctcccatgttcaggcgattctcctgtctcagcctcccgatagctagaactacaggcgtgcaccactatgcccagctaattttgtgtttttagtagagacggggtttcaccatgttggccaggctgatcttgaacttctgacctcaggtgatccacttgccttggcctcccaaagtgctgggattacagacgtgagccactgtgcctggccttttctgttttatttttaataaaattaaatcttactatactgctaatttggaattctaatttttttttagaatatgtttccatgtcatgaaatatttttatatttttattagctgtataggattacattttatgtcggccataatttagttatggataaacactgaagttttcttccttggccgctgaggaaacagagttaggaatttgagtgcaactccttctgcttctccttctcatttctatagcataaaaactctcaaaactggccaggcgcggtggctcatgcctgtaatcccagcactttgggaggccgaggcgcgtggatcacatgaggccaagaattcaagaccagcctggccaacatggcaaaacactgtctctactaaaaatgcaaaaattagcctgccatggtagcacacgcctgtaatcccagctactctggaggctgaggcacaagaattgattgtacctgggaggcagaggttgaagtgagccgagttcatgccaccgcactccagcctggttgacagagcaagactctgtctccaaaaacaacaacaacaacaaaataactcccaaaagacacaaagaaataacagagcagtgatggctaccatgagttctgaacccttcctggctgtttctaagcagcccagatgcaaaatgtccaacaatacagtctcctatcagaaaaaaaaaaaaagtaacatttaggacagatgattaggaatgaatcatgaaaacttggcttaattttttcaatattattttgctacaaaacgtaaagaaaaacaaccctgtcttttactccctctgtcatacacaaatagaagtactagattgggtgctaggagcattcttcctttgtcaaatccaatgagactccgagtgctgggattatctttgctgctttatctgtgggtgccaacgccaccgtagatggcatttgcccattgcaaggctttatcagtgttagacactgctgtaggagacaggaagcagttccagggctaatggcaatgaaacgagggtcagtatttctttttcacccactgttgctttgggtgggttttatcacttgtgtttattttattattactgagtgatagggaggggagcaaataagagagttgatgctttgcttccgaaatctatggagcctcagcattgtattgaaatgtcactccccgctgtgtttcatgagcctcccagcgctttgttcctcgggcagtgctgatcattacttctgcaaccataaattttgcctcctcttctacaactattttatgtcagggaagatgaagtgaccctctatttctttgtacatttcccctttccaccttccctatgattaaaaatacatcttgggtctctgcccagggttttcatagggttgctttccaaccatttttacaaagatagttgactgtttcttatatcagatatttccagagaaagaatgttcttaattaagatgccattcctgggaaataatctcaggacttcctgatgcagtttaaacttgttccatctgtcctcttccttaagggtgctaaaatgtcatattttattaaatatttgttgaaaaacccagttgcatattcacagtgatatctttcttgtggccttttctgtactacagaaaatattagtcagacttcaagaagaaaagctctggaggggaagggggcaggatggattatggtaaaatactttggaaattgctagactaagcaaatttaaacaggcttatctattgcatggctcctgggatgtatggtgaatgcccaaggggagggggagaacatgagcatttcccaatcttatttgacacaggatcttgttgcccaagcacctactgtattttctaccattctaggaaatgcagtttgagaaatgcttaatcttttggtaggaacccaaaggactaagacaaaatcatagacttgggatttgcctttctttatcagcaccacattgcagctgataggggaaaaggatttttcttctgcctgtacctcttggtaagttaggaatagtagaggggaacgggagggaacctgggccaggagtgagcacataggggtggggagggggagtgtaggtgccatgggcagtgctcaccactgaggcactcaatgatttgaaaagcattggttaaacaaacgaaaatcaactgagttctcctgaaaagccaataagcatctggaagtctgtactaaggaattgctatcttcatttccattcttagagacacctacattgatgctttcaactctatatgaaagtcaggaagcatggcagggaggaagggaggggaaaagcagggcctacatggagagtctttactaggagagaccagcttcatggaaatgacattatgcccagaaatagatggtgtttttaaaaatacacataagtagagctttaagttaaatcttaatgaaagaaccaaatcagaaaaagcagactggtttcttttaaaaagagaggttccggagcccctgctgtggcctccaagaatctagggtgttttaggccacctacatgggttctgcagagtcaggagtttgcatgcatccatctctaccctgttagatgtacaatgtggctccccccagcaaggcctactcacctgccagtggatgccgatcagcactggaaatgaattcttgccacagtgatttatcctgtggaaccctaaactaaatgggaaataggcagccacagtattccccaataaaaggaaggaagcccagtgaaatgtcatattggcaccaaagaaagatactgggtttacttgaatatgcaaaactttggccaagaatataccagatttatttaaccacttcctcaagttatttttctgggctgaggcaaggaaaaaataaataccatttttcaagtacagttacacaagtaggtaagtatgagatatttgaggtagagcttttcattctctgattacagattattttaaatgtggctattaaaaatcaatttccttttttgatatgcagcactcttcgtatctacctatccatatgtctcacatatatatgcctctggccagtggagaaactgaattacaatgaaaaattatcttaaagatgccaaggcaggccttggctccctaatgctgagccctttgcactttggcagagaatttttgtcagaactgtcccaggtattcaaatgccattcttctgcattgttctataactccagctacagaatgaacacctgccaccacatgacccaattagacatcctagaaaggggtatccaatcttttggcttccttgggccacattggaagaataagaattgtcttgagccacaaataaaatatactaacactaacgatagctgatgagctataaaaataaataaataaataaataaaatttaaaaaataaaaataaaaaaagtttgtgcataattctcatgttttaggaaagtttacaaattcgtgttgggccacattcaaagccatcctgggccacatgtggcctgtgggccatgggttgggcatgcttatcctagaagtatctagtttgttatatgaaattgctaggaatgaagcatccatttcaaatagcctgctaactttagccttgctcaaggcatttagtccttttgtaatctcttttttgtcttatctgatttaatttgaacaaaccttactttacacttttcatatttttgttgcattttgttcaagaacattatattgcattattattgtatattgtaatttcttaaaggtaaaggcagcctctaactgcaaataaaacatctcaaataagacgtttcaaaaaataagaccaaataaggcagcatgttaggatctggcatcatatgtccctaatagtgtctagatttgttaatattggtaattcaagatagagttaagtaatgatatttatccagctaatggataaatcttcagcaggctccgattttgttgtatcatttaggtgacatctacataatccgatagcagatggctgatgagagcatctcagatagcttgcctgtgacaaacaagacaatatgtggattcagctaggtcaggattgtgtagaatcagccctagaagctgagaccaagacattgctgcataaacaggaggaaaaccactggtattctagcaggaggtctccaggggctgctggaccctccatagtcttaatgataaagcctgccttgtacacttaagcacatgactttttatggaagatgcatacccaagaatttaagtagtgaatttttttcccctcaattactgttggcaatcgaatgtacagttgtcttgttctccctctgccctagtttcctagaactactgtaacaaataaccacagactgggtggtttaaaacagcagagatttatggaggctagaagcctgagactaagtggtgggcagggccatgccctctctgaaggctctcgggaagaatccttccttgcctctttctggcttctggtggcttcagacagtccttggcattccttggcttgaagatgcaccactccagtctctgcctctgttgtcacatggccttcttccctgtgactccatgttctctcccttcttatagcgacactagtgattggatttagggcccaccctgatctagtaggatctcatttcagtcctcttctaaaacctaagcaaagaccctgtttataaataacatcacgttctgaagttctaggtagacaggagttttggtggacactattcaacctactccaccctcttaattctgcttttaatttttattttttattctttatgagacagagtcttgctctgtcgcccaggctgcagtgcagtggcatgatctcagcttactgcaacctccacttgccaggttcaagcaattctcctgcctcagcctcccgagtagctgggattacaggtgtgcaccaccacacggggccaatttgtgtgtgtgtgtgtttgtgtgtgtgtgtgtgtgtgtgtgtgtgtgtgtatttttagtaaagataggatttcaccatgttgaccaggctgatcttaaattcttgacctcaaatgatccacccacctcagcctcccaaagtactgggattacaggcatgagccaccgtgaccggcctccgctttattttcttagtactccttccattcatcattcttcaataactattttaaagcttattaagaataaattttgttaggaatgcctatcaggcatatgagttatataaagtgctatattatttaactaaaccattaactttctgataaaatgacaaagaaatcattttttgcactaagatattcctaaattcatctttttatagaaaagttgaaagcccatctaagtatctaccagtggggaatagtttgatatagaaaatcaatgtgacatttcccatttactaaaaataattttcagaactatgccgatataatatatgcatcaatgaaaatgcaggttatataacttctaataaaccatggaaaatatgtattcatgtgcaaaaatgacacaaaaatatacaaaaatgcttggttaggatagatggatcatttaatatcttgctttattgattctttaatgtcttgctttattgattctgtaacttgttttaagtaattaaagtattatctgttattcctatggaaaagactaccagttactcctcaaaaatgccatatactctcttcaggcccccagactgattatatgttattaaaaattagcgagtatttgtttcctaaccacccagtcctgtgtgttatcactgaaatgtgccattgggattggatgcttggcaaaacatatctgaagtgagaatgtacagagaagcatagaccaagtatatctcctccaaagaagggcagaaaagtttaatggatacaagttaaacctcactctgcctcataatggtgtggacaagtggcaagaagaggcatttgggagtcaggcacaaagagttgtgctaaaagtctaggttggtcaaattgtgtcttcatgtgctgaaggaccttaatcatgcccacttcatggcatcctgatgacgatgagaaagccatgtggttctcctaacacagcatcacctcatggttgaccagtgaccacagggcagaaggatgctgagtagaaagacatgaattggcatcagaggagtcttctgaacattgcatttcctctctaagcaatggaggtagaccctgtgtctcctccagacactactgactgaagagagatgtcagcaccatcagcaccactaaaagtaatgttgggagccaaagtattgccatgagaatcaccgaattgttgtgaagagagatagcagcagtatgaatgcagagatcgagttgccacctcctgcaagcacctctaaaagtaatgttgggagccaaagtattgccatgagaatcaccgaattgctgtgaagagagatagcagcagtatgaatgcagagatggagttgccacctcctgcaagctgccacctcctgagcctacttgaggaacttagcgtcacaaatgggacaaccagcctttatgtccctcaatgtgatgcatataaagtcacagcacctcctagaagtatccttaaagaaagatgtcaagagggattgctttagactaaaattgacttaagagacataattatcagagacatagtgtgaaatctggtaccttgattcaagcaatgtaactataaataggggaaatattaagatgggctgtgtattatatcatagtaaagaattacgccaattttgttggatatagcattgggatggttggctccaaattaaatttagagctgcagagacaagttattaggaattaaatgttctgatatatggaattcaccttaaaatatttcaatagagaggaaagagaaaaaatgaaaggaatataaaggaaatgtggcaaacaaatgtttataattgttgggttatcatcataaatatatgaggggttattgtactgttctctccacttttgtgtatacttgaaatgttttgtaacaaagagtttaaaatatataaataaattcctagaatattaacttgccaaaaataattgtctgtgatttttttttcctgagcaagatttaagaactaatttttccacagctgttgttgagaggcaaagagttcttagggatcatgggtgataaaaacagaccttctcacatgccactggtgggagaataaattgatgcaatttcggtggagtgcaatttggcaataactaccataggacaaatactcttacccatcattctaacttctaagaatctattctgtaaatatatgtagaggtatgctacgaaatgttcaaagacattcactacaatactttaatagcaaagaactggaaggacaagctgtctaccaataggaactggttaaagaaattatcaccattcagagaatggaaagtttaagcaacccttataattaatgtattagagctatattgccaatatgagaatgtttcccaagatatttgacattaaaaaatggtgcagaaaactatgaacccatttggagttttaaaaaatatcagaaaggatacaagaaatggataataatagttaccttctgggcgtaggattggcaggagagaaagttttcacttttcattttatatatttgaatgtttaccatgtgcagatgttattttattttatttgtttattattatttttttctgagacggagtctcactctgtcacccagcctggagtacattggcacgatctctgctcactgcaacctccgcctcctgggttcaagtgactctcctgcctcagcttctcaagtagctgagattacaggcatgcgccaccaagcccagctaatttttgtatttttagtaaagacggggtttcaccatgttgcctaggctggtcttgaactcgtgacctcaggtgatccacccttctcgtgttcccaaagtactgggattaccggcgtgagctactgcgtccggccaaccatgtgcaaatgttattttctgttataaaaaggaaaagaaaaaaaaattgaaacctagagaattatgtgccccgtgtactgagaatgttatcttaagaattatcctaagattgtaattaggaaggcgattctgttagggaaaactttataaacttacacagtatttaaaatgtataaattatggatggtttcaagttaacaagaataattttgccttctatagtatgagtaaattgtgcacgattatatgaaactctgaaagtacttggaaatcttcaaatggcattaatataaaatattaaattctactatcttttaagttcaagttatacctgagaaaacactagagaaagatttcattttgtctaccatggaaccaaaattggctttgaatatgtattatccttctgtatcgaaaaataagacctacctgcctcaggtactttttgtgttcatcatctcattgaattatcatgattattctgcagggcaggtggtatccaccctaatttccagataaagaaactgaggctggggacattaatcaacttgctgaaagtcacacacaagtgaagaaacagtctagaacccacacacttcactcagtttgtcctgacactttgcctccttcatatcaggaaaaactttgtatcaggaaaaactaaataaaaaaatcatctggtctttggcccttgcttttaactcctttcttgttttctgcaactagctgtgccttcctcagtgtgtcttatgtcctaggaaaagattattaacagaaagcacaacaggtatccaggattgtagtttattaagcagagttttaatgaatattttcagtaaaacagagaattaacggctcattgggtttttttttcccctagatatcgtggatgctttatcagatccaaagaaatttctctcaattacagaaaagagagcagaccaaatgagagctatgggcattgaaactgtaagtagaaatggttgattaaaggtggccaagttgtgggagtttgattatcaaacagtgtttacaaaaacaagacaaagtaatgaattagcaaatttaaggagggtttttaaaactgagctcatcaattcaacaatagttaactttctacaaaagtgtggcatgtttaataaaatgtgactgccatcagaaaaatccacttcatcatcagtggcttaactcacatctggggaccccttccccattagaaagaaaatgcaaaacatttgttatacttttgggaaagtttaaaatgtaggtggagcatttctaatcagaaaaatgcaacatccgaaaagttccaaaattcaaaaccttttgagtgctgacattggatagtcatacctttgctttttgaagtttcactgtacataaactttctttcatgaacaaaattactaaaaatattgtataaaattaccttcaggctgtgtataagttgtatataaaacataaatgaattttctgtttagacttgggtcccatccccaggatacctcattatgtatatgtaaatgttccaaaatctgatatccaaaacatttctggtctcaagcatttcagataagggatattcaaactgtactgtacaggatgtttctatgatacactgaaataccagttaacctagttcagtgaattaatgataattgctttttatttttaattatttattttttaacagataggatctcgctctgtttcccaggctggagtgcagtagtgtgatcatagctgactataaacttaaacttctgggctcaagccatccttccacctcagcctcctcagcagttgggactacagatgcatgccactgtgcctggctaatttttttactttttttgtcaagacagggtctcactctgttgcctaggttggtgtcaaactcttggcctcaagcaatcctcccaccttgacctgccaaagcattgaaattactggcgtgagccaccatgcccagccaaaatggcgtttattattgatttttcactgtttgccagccttacatcccaaccttctcccattccagtgcacacgtggattgtttctttgtttttaaatgttctctttaccagactcctcagtttggaatggatgtagcatctctccaatagctagaaaaagagaaagtattctctgcttgttaagaagttggatcttctttccttggctggatcctttgcctttaagagagtagaagtctaggaagagtatggtagaagtttactggattcagtaaaataaagaatgtacaagatatttgaccttgagtgacattcatttgggtcaatgtaaatgtttctgttccagagtgacatagccgacgtgcccagtgacacttccaaaaatgacaagaaaggaaaggccaacaccgccaaagcaaatgtgacccctcagagtagctctgagctcagaccaaccaccacggctgccctggcctctggtgtggaagccaagaaaggtgagagagagccgttgggttccttatcttctgcacccaccttaattacacagtgtacaatatctatagctttaggaaatatataaattcgaagttctttgtgggaaagaaccttttacatagtgatgttaactaattcatccccactctcttccagaccctcccataggtagttacctggacaggccgtgggctcatgaaccaacatagttattcctattggacatttctaaattctcatactgataattttccctcataagtagaaacatgattatttgtttgtaaaattatcaaatgagcacttgaaggccaattccatgtgcttacctgtagatgaaacaaaagatcattaagaggtggcatcacaaagaatcacgtgtctcatattcagccagtatgtagggaaacaactgtgctggttattttaattggtttccatatgaattggccagacatccattgattggatggtgcccattccatactggagggaaagtgggcagggagaatgctgatagggagtggcaaggagttcatttttcttgttctggaaagaattctggggtcatcctgagaaggtcatgggaaatgagtcaaaggagtatttgaagaaaattatagtcttggcagaagaattcattgaaagtgggcatgctaagggcaaggtaagaattatgatactcatgcttctgttataacacacctatcacattgtgttaataaagtattaacaaccagagaaagaggttattgcagatgagaccacacctcatcatcagtgtgtccctggaaccatgcctagttaaaatctagtagtctattttctcaggaagtaaagcgctgtttaatgaatgataggggcaaggaaatctagattaagttggaaattgtcaaaaggaaggaagaatagaaataagttggcagcttgaggccaggtgcagtggctcatgcctgtaatcccagcactttgagaggccgaagcgggcagatcatgaggtcaggagatcgagaccatcctggctaacatgttgaaaccccgtctctactaaaaatacaaaaaattagccaggcatggtggcgagcccctgtagtcccagctgctcaggaggctgaggcaggagaatggcgtgagcccgggaggcggagcttgcagtgagctgagatagcgccactgcagtccggcctgggtgaaagagggagactatatcttaaaaaaaaaaaaaaaaaagaaagaaagaaataagttggcagctttgatatgggccttaggcagaaaggggctttttggtaactcagacttcaaggacagatcccagagatagattgtaccattgagagaagtagaggagttaggaggaggagctgcttttggtaaggaagatgattttggttctgtatatcactgaggacaagctgttgctgatacatctgggcagaaatatgcaattaccaaatctatatcaggtggagaagaagaaggagggacagagaaacagaataagaatacttagaaggcagaatgaatggggaaaaaagagaaaagagagatctatgttctaagaagaattagttttgagaagatgctgtagacaagtccagagaagtgaagactacaaaattatagttgaaccaggggtgattggatgatgaaggtagaaacatggttaaaaaaatgtgagacataatttaagacataaaatggttgttctggaggacagtagcatgttggtaggaactaataaagaaaaacaaggaaaatgcaaaagagagtacatggtaaaacaaggctataaggaagatctgaatcaacagaaagggtgaaattcagctggataaggaaggaagagatatgttctgtctgagctaagaagaatgatgagtgaatagaagtttcaggatagacaggaagaattcttgacagacggtgtatcagtcagcttatgctgcataacaaatgacctcaaattttagtagcttaagacaaccaccatttattgagatcatgtttcattgggttggttggtctaagctggcttggctaatctctgtgtcttgcttatgcacctgtgatcagctgataggttgactggaaggtagatgtgggatgaccttatgcacacatctgtcatttggcaagttgtttcacattatcctgaagcctgagcaggcttgttcatatggtactccctgagtttaaagagcagcccttttccagcctctgctagtctcccattggctacagcaggtcacaaagtgaaccaatattcaaggggtagagaaatagactctacctcttgattagaggagaaagaaatagtggtcatttttgtagtataacacagatagattttatctgatctaagaagttggttaggtggctgctctctgctgagaaacgtagaggtagaactgaaaaacagcagtatagaaaagctttggagttgcccctggctggaatagaatgatccacaggaaataaggagaaggtctgccacatagcacacaggaccctggtgagggttggtggtgtgtactaagttgatgtagcttgatctcattacttcttcagcagtgcccagaaactcagcaacaactgtggacaaagtacagcttagggagttgcaagcctgaaattatcacaatttatatggtctgggaccaaaagtttgaagaccattaagttatgacactgtaacagttggctattgatgtgtaacaagcaatcacaaaagtcagtaatttaaataagtaagcatctattatagctcatgaggttgtctgggtggcttttctggttatgggaggattagtatcagtgactcagctgatcttagctatgcttattcaaatgtttggggttcagctaaagtgtcattggctgggacaagtgggctgtcttccttgtggactctcatctttcatcagcttagcctgggcttgttcacatggtagttgcagtgttctaaaatggaggtgaaagtacagatgctccttgacttatgacagagttacatcctcataagctgaacatatcattaagtcaaaaatgtgtttaatatctaagctaccgaacatcatagcttagcttagtctagcctattttaaatgtgctcagaacacctacattagtctacagttgggcaaaatcatctaacacaaagcctattttataataaagtgttaaatatttcgtgtaacttattaaatgcagtacagtgtagagtatacagctgattgggagctgaggcttgctgcagccccagcgcatatccctagcttaggaaaagatcaaaattcacaattcaacatatgctctctactgaatgcatatcacttttgcttcatcacaaagttgaaccactgtaagttgaaccatctgtatgtcaggttccttgatgagtcctagacttagaactggcatggcatcctttccactacattctgtcatcccaagcaagtcacatggcccagctcagattcaagagttggggaaacagattccacatattgatgggagaaattccaaagtcacatgtaagtaggtgtggaaacagggaggggtggaattttttggccatttttgcactcagtctgccaccctgatcataatatataggttaatgttccagtggggtagatactagaggagagagacttttctaggaaaggaaaaggttaaagggaaccaggaacaagatgaaagtaaaaagcttgcttggtaggtgtgagggagtgagtgaagttggcaggatggagattgcagtcagaaagaggttactctaagctacttgtcttggaggaagggcagtttcaagcagtgttaacatcccgtttacaactgtcagtgggaggtgaggtaaagtagagatgaagatttctagaatggaaggcatcatgaaaacagaaagaaaagtcactcagcacattcttctcatgcatattgaatcactgtgttggacgtctgggaatgcctgcataggaaaaccacaattcagatatgaagttcatggggccgggcagtgtgtgacctaaaaggacacatgtggaggtagttaggctcagcagagcctggtgtaagtgagaggtctgttcttttgtatgatagtttttaggagaatggcatggaagtacaagagagaagtctataggtgttcttcccacgcctctccatggattggggtggggtggggaataaactctactccaggagcctttgggggaagtgatgtcatttgagaaagcaagcctccatttctttccagaaaactgtcttaatttgagtcaccccaaagaccctgagagaaggcttccagtgcaagtagtttattctgggaggcagtggacatggatagagatgtgaagaagtgacaccagggagggaaggcagccagtaattagaatgttttaaagccagttgccagtaggcacctggaacttaatgccctggagaaactctgggggctggtattggacatacttctcagaggtctcctcttagagggatgagggagctggggaatgtataccctgactcctgtcagccttttcttgagggttcccgtggaagggataaattctcggcattcagacgctggcaattggaagtgaactagaagagctgatgtagagagggcatagtgtgtggctggagcagacggcatttgctgcagacctctatgaaggtggggaggtgtgaaattccaaactgtttttcttagacattcagccaaacagcaacaactgcaccaacacgactttttttttttttctgattttaagaacaaaggattaagaacacccagctcctaacttccagattagcaattaagagaaaacaagttattgttaaggaactatgctgatatgaacaaaaactttatgtagtgaaacttcaattagctaaaacccaaaatgtgctgcctaacctactttcataccagggaagcctgtagacctgcacagtcctatatagtagccactaaccacatggggctaccactaaccacatagggctatttgaatttatttaacaattaacttaaaagttaaaccttgagttcctcattcacactagccacatttcaggtgctcaagagccacagatggctagaggccgtcagttggacagacccacgcatggaacattcccattattgtgcaaagctctatgaggaaggctgttcttggcacgcagatggaactgtcctcttctgtagagtgtggtttttttttttctaactaaatcacttatgggaatcaacatttttacaaattgtgtctttcccccaaaacacaaaaccaggtagttgagggaagtttatgtttttgtaggttccttttaatcaagacttagttgaaccaagacaaaaagaaaataaaaattgagagagagagtgtaagtttcatcagactgggtcaaactcagaatttgctagatctctggaggaccttgcatactccccaaatcctgtatgttcattttacagatgagagagctgaggcctaaagacagggagctctttgtgtgccaggagtcactcccttgccttaccctgcctcagtcactagagagacagcttgtgaaagccaacttaggagatcagtagagagccccatggaccctttataccccgatcataaaatgttacagatcacaaggctgatttccctcagccaaaactttccttctgcggcctgaccaccctatcattgaatgtgcacatcttaaaatgaataaaagggaaaaacaagagcctgggacttgatgcctatctttcttgaatatatcatacctagcctttgggattctaatggaaatcaattacagcacagagtacacattcattttgtttgcctaagatgaaaatctgcagtcaaacagaaactgtttgaggatctggctacaactgttgttgccatgacaacacctggcctagcatcactcagatagcaggatgacttagtgtattaccctagctcctcctggtatgctcctgttatacactggtttgattttattatttcctgtatgtttaaggcattgctgtgctcaatagcacattgcttaaatgctaagattgaatttggtaaaagggagaagccagaaaaaaatgttttattctttcacaatgactgaattgagaatagagttgggaattagttgactggcatgatatgccttgaaatacaaaggtaagaataaggataatagatacttttgtgcctgatcagctcccctttatgggttcactatcccatctcacagctcctatgaattttggctgattgggcatttcagctgcccttctccatagaattgccctgggaccatgagagttcccttgcctgaaaggttttgtgaaacctctgtagcactcagctgattgatccagggttacaaatgcccagcctctttttgccaaggtggaatgactcttgggtgccatttgtactgaagagctccctgcaggatcagactgaggctggatttctactggaaacacaccctaccttgttcctctgccctgctccacttctttcattcccttaggggtttctcctgagagtctgccctcaatcaatcacttgcacatgaatccccttctcaggctctgcttgtaggaaacctgacctaagttaagacattcaacatttcaattgtccagttaattgctttgtaataggaacttaagatgtttatattcatcatatgtaaagctgcttcaaagtctttcgatgagatttcgatatgtcagttctatattaccagttattctctctgatttttagtatacatagtgacttaattttttttgtttgtttaggtattgaacttatccctcaagtaaggatagaagacttaaagcagatgaaggtaaaattgcttgactattttgcaagcactcttgtattacacatattggtgacaccaatatatttttgtttctcaccaagtgtaatcattgtgattacaaaaagaaaaaacaaaaaacctatttttgattctatttttctcccaaaggcttacttgaagcatttaaagaaacagcagaaggagctaaattctttaaagaagaaacatgcaaaggtacagtgctctacagctactattttgtgttatgtatggatgaatcatttgtagccaaaaacactactttgaagctgataccagaccacttaacagtaataactcattctaactggttaacaatgaaattaaaaaatagaatcggtttgggagtgcttgtcacttgtttgtagtctgcatttctaacaattctttcaaatgcataacaaagcttcatccatttaaaaattgtttcactaggccgggcacagtggctcacgcctgtaatcccagcactttgggaggccaaggtgggtagaataggatgtcaggagtttgagaccagcctgaccaacatggtaaaacctgtctctactaaaaatacaaaaattagctgggtgtggtgacatacccctgtaatcccagctactcaggaggctgaggcaggagaatcgctttaacccgggaggcagaggttgcagtgagctgagatcgtgccattgcattccagtgtaggtgatagagtaagactccatctcaaaaaaaaagaaaaattatttcactaataacatgactatataaaatattgaagaccagctcacaattctagccactagttacctaaattgccaggtcactgtcacatagtttgccatacacactggtgcatggagggagatgctagcaatctgtcaacctcccactcacagcacctagagagagaacacttgtcactttttctcccttatgtaaatcttgcccagtagcctacttctgaaatagatttatttttgctttttacccataagaagtggtattttgacagtgattgtgaaaaattacaagagctagttgcaaattgtaagagaacagcaggaggtggccccaggaattctcctgtgggttgaaaaacgtcatggccctcaaacatcgtcacttccagactccctcacaggtaaagaagaaaaaggtagtacctctttccttcctaagaacatataataaccagctgctgctggtaggataatgtctgtcctcttttattaagggcaatgagagcaagagaaacttaatttataatttattaatttgaaagaacttctgagttcttttaaactaatcttgcattcctgtttctttattctctgacccaagcctcaaaccaaggcatgtccttcagaacttggcttgagtgatgtaccttttaatcattccacgtattgagatgccgagaacattgtctggaaccctgtcccctgtcatttctttaagagtttgtgctaacactgattttttgagaagtcatttctttaagagtttatcctaacactgattttttttagaagttaggcctaatcttatcctagtaatgttccctgtattacagaactgttgggctcaatggatttgctgatacagtcacttcacttcaaagactgtttctaagtttcatgaataattccattcagtgaaattccttacattgctcaatggggttattggagacagaacaatttaaagtaggggcttcaatgttgttggttattgacaacaggctgaactatggaaagccaacagaaaaagagtaagaatgagaaataagagagaaagcaccttaaatgactttaattatttggaatagagtggatgcccgtatgctgcagcactatctaacagatttttcttgcatttaaattggatctcttttattgagcagacacctcagtggcctttgggctagttggaaacataaagattttggcttcatttaatattttcttgaggcatggccagaaaatatgctgtggcgggtggtaataatagcagcaataatagcagctagaattcctgcatgctcagtaattctcagatgctgtgctcagcaccttatatgcattgtctcatttaagactctaccctgtaaggtaaattctatgtgagtctccatttatatgtgagggaattaggaattagtgaagttatctgatgtcccagagttaggaagcagcatagctgatatttgaaccaaaatcaagagtccagaatccatagtcttgcaccatactcctgtgtaggatatgggatgctcactaagtggacaagttccctcattgggtcaaatgcagtgacagcacatgggacattagggaaaatcactatcaactttgggcagtgttgatatactgctgattatcaggactgtgactaaggaaggatgcccctcaatttttagaacttaacctacatcagagttgtccattaactccctggagccatcatgcccggcccaagctaacttctaagatgaagaatataatgaatatttacttgcctaatatacaccgatgccagctctgttaacatattgtctttaggcgagacatggtggctcatgcatgtaatcccagcactttgggaggccaaggcaagcagatctcacctgaagtcaggagtttaagaccagcctggccaacatggcaaaaccctgtctctagtaaaaatacaaaagttagccaggcatggtggcaggtgcctgtaatcccagctacttgggaggctgaggcaggagaatcacttgaacccaggaggcggaggttgcagtgagctgagattgtgccactgcactccagcctgggtgacaagagcaagactctgtctcaaaaacaaaacagaacaaacaacaacaacaacaacaaaaacatgttgtctttaaaaccaaaaaatgaaaaactgtttaaggagaggggaacaatgtggtgaatctattaccattggacatacttcatgcctgatctccatatgacgtgtttatcctaacactgatttttctgtcagtcaacacttttaaagtggcaatactagcttgtacatattgatacttgcttaagcacatattcttaggtattctcataacagttatataaaggagtactataattatatgagttttgtatctgttagcttttgcagggtaacaaaccaccctaaaatgtagtgacttaaaacaatgaccatttatttggctcacaattttgtgcatcagtagttggagctgggtttagctggatggttcttctggtctcagctgtattcactcatgaatctgctgttactaccagtttggttggcagatgggggactggctgatttaggtcagcctctgttaaaccacttcctctctgctttatgtggtctcctgtcttccagcaggctagtccaggcttgttcacatggctggggtcctgagagaccaagcagatcaagcatagtttcttgtggccccagctcagaactaacacaccatcacttccacctcattttttggccaaagtaggtcctaagtctggccttatgaggtctctaccttttgacaggtgacaaagttacatcagaagtgggagtggatgcagaaagggaaataactgtggccatttttatagcctaccggctattcaacagattagcttattaatacttaaaaaaacacagcttcattaaatcatctagtttttaagtggtggagtcaggatttgaaccaaattcagcccggcttgagaactcagacttgtaaccactatactcagctgcctctgatgtttctcacactaatttttcttctcttcacacatctttttctttatggtctcactaacaggtttttaagagcaatcatgaacctatcagggcacaaatatcttgggttccttcaggactggtttttcaacataaggtcattgggccaagagctggaggctttacaaaaatatgtattcttatgcctatctgacacttagctatcatctctaagaaaagaatataggaaatacagaaatacattttagataaactcctctcctctgcatgctaaattttgaggactgtttttttaggaacattatgtagcactttttactatcttttgagcccttagtagaaaccccactaatcgcctgcaaagacacttatcaagcctccttaaagaaacagaggttttatcctcttgccacataatagtaagaattaattcctacatcctttctgtgaaaggacatctacagctcttttataatagttttcagccacccaacatggagctaaggcttaccaccccaaagccttatgtcataaaatgacctgctgatgaagaaatatgacctgggctgcactctccctactagtgtgcccctggcccaaacagcccttggtagctaagaacagggactattatttagtctatatccagcaactgtagggagatctcagctcttacatatcagcctagatcaagcttgtccaacctgcatgcagctcccaggccacatgcagcttaggatggctttgaatgcagcccaacacaaatttgtagactttcttaaaacatgagatttatgcacagactttttttttttttttctctcattggctatcattagtgtcagcgttttatgtgtggcccaagacaattctttttccaatgtggcccaaggaagccaaaagatttgccactgctggcctagataaataattctactttttagacttaaagagaagcagagaatctatgaactatatctcagcagtttaagaaataaatgtatggtcccaaggagagcttatttccaaacttgcaggttagctaccagatagaaaggaacagtggggtgagtgtgaggttctgccatttgcaaataggtgtgcaatttgctgttaggatattgagaagaaaagatgggggtaacgaccatttgcaccccagatggatataaaaatgctcattaaaatgtctatttttggaaaatggcaatgatcaactgcatttgaccctctgaatgtactggcaatcaaacttctacttgtctcatactttctagaaccacttcaattcgaaatggaaactagggtaatggtttttcaagtgtctattatatgagacacagaaaaaggagaattaattaacaataatcctcccccagcacatgactcattgggatccagagctgcagttactttcattaagagacaggcatgcttttcaattgtccaatgaggtcaattccttagagccaaaaatgtaaaacccaaagttggatacatatctccagtaacgtgttagaaggggaattacaattcaaatgcctatggggtccaagcaggaagtagctgagggaagttggacaggtgttgactccataaaagctgggagcactcatctctatccacaggccaagtcagtctgagctaccaccattggtgcctggagagtagatgggtcagtcgtgtcctcttaaaggagagtcaaaaaatcagaaagcttatctgaatttcctgatcttttactatcggcgtctaattcaacctctttttgaaactgcgtaggaaaaaacaaaacaaaatccaaaactaaaaactacatctgcaggcaggatacattccttaggccaccagtttgcagtatcaacattaaatgagtcaaatgaaatgcctgagaagcctactaaactctggcatttttagtaaagctactgatggaaaattttctctttgctatgcaagcaatttagccgacagcaccaagactgttgttaaactcatcaattttaattcatggtcagaccttagtaccagacctataacttagttttgcagtggaaaggggcagagacacagcagttgccctcagagtccgcctattggtaatctcagagttacatgctgagcaaacatgatttactccaatttttcagcaccctctgtggtgcgatcattcacgcccatagtcacatcagtcacaagaatgaattgcagcagcagttttccccaaaagaagctgaatttactcttaacttggataagaaacgtacacaaattcttctgaatgctatacatgtttttccccaaaatgtcccagttaagatttactttaagttaacacatttaattttggtactcttggcttgaatgaatgagaaatgtatgtctcttcaatagtgtttcatgatttaactaaggaccaaaagaataaaaccaataatggacattttttttaagctaagatggacttagagatcatttcatgcctccttcattttacagcacaatgagctgagacttgaccagagtcacatggaaatcagtaattaggatccccatttctttctgaaaggacaagtggtgtctgggaatcaagttatcccaaaacacttcagcaatcactgcctaccacacagggatggagttttgaataaaaagagaaacagagacaatttttcaggaccagctttcctgttactgacattaattatagtcactttaattcaatatgctttcagtttttcaaattatttttgcatatgtttagtaaccttgcatctcataagcaactcatgaattcggttaggcaaaggtacctaactcagttttcttttcttttcttttcttttttttttttttttttttgagatggagtcttgctctgtcatgcagtggcatgatctcgactcactgcaacctatgcctcccgggttcaagcaattctcgtccctcagcctccagagtagctgggattacaggagtgcaccaccatgcccggctaatttttgtatttttagtagagttgggtttttgccatgttagccaggctagtctcgaactcctgacctcaggtgatttatgcgcctcagcctcccaaagtcctgggattacaggcatgggctactgtgcccagccctaactcagttttctaataaagacattgaggcctgggaagatttatatatgttacacaagggcagttgtttaattattggctgagctgggaccagaatctaagtcctcttgctattttcctatgctgactttttattcatgcgataaatacttattgagcatatactttgtaccaggctttgtgccatgtactggtaaagagaaaagacctgccctgctcttgtagagcatattacatagagttgaatccatcataaacaactttgtggtacaaagagccctattcctcatatctaattggattaataaggttcaccaaaatattttcttaggaaaaaaatctgtgtcaatttacatccaagcctcaaagtctctacttgtcctgttctgcactaaaatatttaaagaaatagccttcaccctcctttcaatgatatttgcaagataatataggactgtggcacttctgatatattttgagacctgcagaaagccccttatttatttaattttttgcccaggaaaaattaacacatgggttagccaaccataatgatttctaaatcttagaaagaagactaggaggagggcattttagtaggtaccaaagtattacaagagtagttaaatacattcagggatacatcaacatgttcctctattcctggggcagtagatcaagcatggaggaaacatttattgatttaattagtctgattgatatccctatctcaagtcactctctgtgtgttatcatgggtattgaatagtatagataggtttgtatgtcactgtgttttgaataagctgtaacacacatttgatacattagattcacttttaatcctaacaaccctatgaagtaaatgtcactatcccaattataaagatgagcatactctggaaaggtaagtgactcaccccagcactgaaaaacccatgtccttaacccagtgccacattgcagaagctctggaggaaatgtgtttatagcacaaaggtgcacacacattggtaatatggctagatttatggggcattccaattacaaattaagcccagatccacagcaagcccacctagcctttgttcccactgtaagttcctatgttgggaatctccctatccagcatcacccttctccactccttctcctaaagacaagaatgctgaggccttgtgcatgaatgcgtttctaaagaatttatatataaatgaattgtagatcaagtcctgtgttaaatctcttagctgggaaattaaggaagtcttggtaaagacttaaaaattccttccccatttatattttatgaaaccgttaaaagaagttcatgaattagatttgcataaagtcaagcctaccttagaaagaaaataaatttgcttttaaattaaggcactattttcttcaataagtgaaaggaaatatgacggtgagaggggttatataacctgaacaacatgtacacccattccagtcatgaatagcatcccatttttctggttctcaagagtaaggttaggctataacatcaagtgtcatttagagttggaaatttctgattgtactgatttcctctgtgcttgggaggctgagcagctaaagaaatctgatttcatataagtcattggctgtagctaaatgcctttttcattgtccaggaagaaataatgtttatattgaaatacctactttccaaagcattgcagccccaatttcaatggttacgtgaagcagatgggaaaatgttttaaatatctgtaaaacagaaggccatagctcctgaacactttatcctcataaactgcttctagataagtaagccagtgaaaatattaagtgatgtagattcaaattcagctgatggtgacaaacacagtgatgcctctcattatataataatggcattcaagagctccaaaatgtgcaggtgtttagaaaccatgtcacatgatgaatagttacatttagcatatacaagagaagaaacatggtggctgaacttgcatgtttgaggaccaatgtgtggaaggggcagtaggctaattacatgtctcaaacagcagaacaaagatgaatgggtggaaatactacagagatgtgtatatgtagaagaaaggacttcgagatgattggcactacccactgctgagcaggagtgcatttgaactgggcatgttcactagactgaggctagagactcccatgttgggaatgcccttggacaaaaaaaccggtgttgaatgggagatctggagtctgtactgttctcagatttggttattccttgactttctaaatgaagactctagggaagctggtgaaagttatgccagccctatatggtgtgagccatgctaagagtccaattcataactgcaaatccttcttgttcaggaacacagtaccatgcagaagttacactgcacgcaagttgacaaaattgtggcacagtatgacaaagagaagtcgactcatgagaaaatcctagagaaggcaatgaagaagaaggggtaatactgtttatttccttctgaagactttctctatgtttatattttgtcttttcccacagttttgctgctgtttaggtcaaggaagaacttagtgttgacttgattttcatcattaaaaattattcctgggaagtaagaaactcattcattttaaatgctctaacatcataacaggtcaatgagtggatgtagcttctggtttggggaaggttctcagcagagattctgatatcttttaattcatcataattatttctaatatgagaaagaaatcttagcctcaaataattgaaaaaatacctctttactctgagaattgattgtcctttttgattttgaactaattttaaatttacagaaaagtttccaaaatactacagagttcccttatgcccttaactcactttccctaaatgttaacatctcacataatcatagtacagttgtcaaaccaggaaattgacagtggtgcaataccattaaccaagccacagtgatttttcacattttaccagtttttccacaagtgcttgttttccactctgggatcacctccaaaattaaatagcatttagttgtcatctcagtatgtgataattcctcaatctctccctgtcttttgtgactttcacttttgaagagagctggtcagttgttttgtagaatggctcttcttttggatttgtctgatattttctcatgatgagagtgaggttatgcatttgtggcaagcacaccatggaaacaatgctgcttccttctcagtccacgatattggggggatgggggtgtgacattgatatgtcccattattggtgatgttaacctggatgacttggttaagctggtatcttacaggtttctgcactgtcagattacttttttccctttataaatactttggggaaaattccatgagaccacgcatacattctatttatctgagaaattatttttcctgcctttgaccttctccagggattccctctggtttttatctctttccttcaatctctgctgatgtcttctagttttccacaacctttggcacaagagaaaaggagaatgagatttctttttcctacttgggttttttggcatttggtttttgttttttattttttgttttaacagtcacccaagatatacctagaaaactaaactctgaaaacagaacagattatgttagttataattttcttggacattggttcatattgccgaaatttcagatcccaagatctaagttcatgacatgaaaccaatgtaatttgcttgaggagtaaatggtgggtaactaaaatgcctgccctggtatcaggcctcactatttgagaggtaccctcatttttattaaagttgtatttttcagaaaaatacaaatcaggcactgattattgagcatctgttattatgcatcatctgccttttgttttccccgtaggtttcactgtgtattattgaggcagaaatgtgcctgttgcttagaaaacattttgatctgtattttaagtgagtaagtgagtcacccacctcggagctcatgtggcaatattggtagtgattacagtaagttttgaggagctgtgattcttctagattctaaccacatcagctttggcctatttcttttttgtaaattaatttctcatatttaatgacattttaggctataatattgaaactgatggtagacagactctaataccaaggagcaaattgttgatgactttatagtactctccaagaataaggttatttgtatttacaagatatcttttcaaaaaatgtttcatgcatttttgtggatcggtgtatttagaaacacagttttggcttaaccaaaccaaaaatttttattaaggagatttcagatccaagcaccatagagtaaatttctttgctaaaaataatattacagttttctgattcaatcaatcatgagtgctacctttagaaatttttaaaaaattgataaaatatatctttacctcatgattgtttttactctcaaagataatgtgggatcaaaatgtaatttattataaacttggtaattattagaagtgtccctggtgtgacacttaaccccccaaacaggctattgagtgctcttggaggtctctcagcaaataaagccctgttttatcctaaacgtagatgagactggaaaagtctaatctgtagatttcttcctgagcctctgctgtcaaacgcagcactcctagcaggctcttcacacagagcatttccaagtactctaaagagtagaatcttagcaatacattaaaagttacttcaaaatcagacatcagatactttcttctggaaagccatatctgaggagagtttctcatcattaatattcaccatgatatcaaggttgcctggacttagtcttgctatgttgcccaggctgaagtgcagtagcacaatcttggcccaatgcaacctccgcctcccaggttcaagcaatcgtcctgcctccgcttcctgagtagctgagactacaggtacatgctgccatgccggctaattttttgtatttttaatagaaatggggtttcaccatgttggccaggctggtctcgaactcctgacctcaagtgatctgcctaccttggcttcccgaagtgctggaattacaagcgtgagccactgcacccagccttcctggacttttaactgcaactgagttgctaaaaagttagtgaaaggggaaactgtgacagtccttggagctttctcatgcaggatctatttttgaaacaaatgaaaggtttccccttactcttacctactcagctgaaaggaaagattgacctgggaaagggaagctttattcaagtgcttccagctttggctaatgactacctctcatatgctttccactcaaggatctttaaggtgatggtaaaaagatgaatgggggaacaagggaagacaagctaaagttgggaaaattctaaattacagaaattattttgcatagcccgaatataaagaaggttgatgcactagaaaggggaaaataaaatcttgattttcaaataaatattacaagtgcatgcccttatgccctcagatgagagtgttgaataaaacctctcattgcatttactgtgaaagatttgtctagaattaagtcacgggaatgtttcggcagtgctgcaaacttattgaataacagaagagagaagaaacttgctcagtgccagccattgagaagtgctagatttgatgcgagaccttgcatttttagagtaatgcttctctcacaggaacttggaattatattataaggaagcattctgacttgagctataataacctagagtatacatgctgaagatgaagctcaggacctgttcttgtttcagcagcgatgtggatattccaaaaggaagacataatcactgaaataagcagtaatagttgctgggcactcgcctagcatatatttcctactcacaatagaataagaagcaaaaattgccctgtggtgccaaggattgctattttctccttcactggcatatttaaaagacaaaaatctggctttataatgaaatggaagaatgaaaaattcacttcaagtctgaggacctattttccagttttcatcccaaataatattttattgaataagtgaaaaatagcttgagaaaaacaggaaccaaaatggaaactgacaacagccccttaatgatgaaataattgttaggtttgaagtgcctctttgtatagtggttgaattgagtaatcatgaaacagataatattttgtaaggtgtgaatctattactagaaagaccagtgttgcccaatgagccatgacatctcatatttgatgaatatattatcttcatcagaaagctttgtagcaaagacccatgggaatgggaaaatatctaatttctggcatgcatttgcaactttccattttcaggggaagtaattgtctcgaaatgaaaaaagaaacagaaatcaaaattcagacgctgacatcagatcacaaatctaaggtaagaaaatgcccatttttacagcagtgacttgcagaagacactttgtaattttttagaaggagtacctagtgtaaattagaaataacagtagcccagagctggtctagtagcctgcagctgatctgggatgtcaggggagcccagggttcatgtttgcctcagactcactggctttaagaagagccatttcatggaacatcttcttttgtcttgtctgttgaactatgctaacaatatttatgttgcctgcctcagaggcatcaaggaaaataataaatgaagatactaaaaggaaatattatataaaatacagaatatacttccctatagaaataacattaaacataggacagaaaaccgcccaaattgggaggtgatacttactccatcctaactttacatggaaatttggaatgagaaaaaattaagagctgatattctaaaagagaagcctaattactcacattttcttaaagacaggagaaaataggagcttgagagactttaatcaactttgtgggcatttggagaactaagtgttaagtcccagttaagaatgaaaacaattcttccagcaatgatagtttttaaatgaaaaggaaaaaaaaagaaaaaaaaaaccaacaacaactgttaaagaaagctcccaaaaatagctgtggttgaaccagccagcctcatctatctatatgcagctgtgtcatctggcctaatggccctgctgcatgcatggagcaggcaagatgttcaagatgttcttggtagctgtatgttttgtagggcatgaactctatagaggcagtaaggcatgtgtctttaagagttattccccactctctctcttcttaactggaatgtttgagaattagtagttgtgcaaactgtcatgattcttagatgcttggcatcaataagaaaagccttggcaacagtatcagtttgcttttgctatataatgaactgtgtcaaagaagagcacattgaaacaactactacagtttattaggtcacaattcagtgggtcagaaatttgggccatacttctgctgattttggctggagacacttgtgtatctactgtcagcagggggcgtatggccttacttatgtatctggtagttgtctggctgttgcttgttttcctacatgacctatcaacctccagcaggctagcacaggctcagtcagagggtagccacagggatcccagcatagcagaagggcaagtactttccagcctctgcttgcatcacatttgctactatctcattggctaaagcaagtcacaggtcacccagcttcaaggagctggagaaacagactccagctcttgacaagaggcactgcaaaaccccactgcaaagagcttggatattgggtggggaggactttctaccctagtgtctatcagggttgacacagtaagtcatgatccagaaataaaagaacacacagctctctattcagacatgtgggcttgtggacatgaagctggagaaacataaggtgataaagaaaatcctgatggaattggtaaaagagcctaaggcccacacaaatcagagtgttggctgagtgtggtggctcacgcctgtaatcccggcactctgggaggccgaggcaggtggatcacctgagatcgggagtttgagaccagcctggccaacatggtgaaaccctgtctctagtaaaaatacaaaaattagctgggcatggtggcacgcatctgtaatcccagctacttgggaagctgaggcaggagaatcgcttgaacccaggaggtggaggttgcagtgagctgagatcatgccactgcactccagcctgggcaacagaggcagactctatctaaaaaaacaaaacaaacaaacaaaaaacaaaacagagtgttgctaagtgaggcagtaaaataagggttcacagttaactattcagagccaaagcaattgatttattttgataagcaataacttcctgcttcccattgattaatacatattattttttggtggttataggtgtctcatgattcaccaattaagttggtgggaggaacctgaaatacctgaataatgttgtgcttttgggttcatacctgacctatgaggattacaatggcaccgtcccctttttcccaaacaggtcaaagagattgtagcacagcacacaaaggaatggtcagaaatgatcaatacccacagtgctgaggagcaagaaatccgagacctgcacctcagccagcagtgtgagctgctgaaaaagctactcatcaatgcccacgagcagcaaacccagcagctgaaactgtcccatgacaggtgggggaattgccgtctccagagtaaacatctaatatttaaaaacaaaagctgattttgtgtgtataagagagccaaggtaataagtgaaatcaatttgacgtacaacatgtagctcttttgtgtatctcatcatatggctgattatgagcaagatgagctataagaaatggcacccaggggccaggtgcagtggctcacacctgtaatcccagtgctttgagaggccaagacaggaggattacttgagcccaggacttcaagacatagcaagaccccatctctattttgaaaaaagaaatggcccctgccatcagagggcttacaggtgttggcaagatacaacacccatatgaacagttaagtcagataacaaagtagcgtatgacacatattttaaaatgtcatgggcactaaaggcatccagctcagaggagctctaccttttcagagtggtcatggagacttttcaaaatggtagggctggaactggcctttggagaatgatctggagtctcttaggtagaaaagacacacagagagataaagaccaatcagttcagctcctagagtgaccaggttctgatcatttaatagctacctgtggagagagtctccatttcccttccttacagtgttaggacttctgtgaattttgaaaagataagcctgattaaaaaacagcaaagtatcagtttattttggcctgtgcccacttcagcaaagtgaatattgcatttgaaatactgcaagccatgagctggacttatccctgagcagaagaaggttggtgtttgttacatctttttatcatagctcggttgcagcttgcttggttctcacttagtgcctaccgtatgccacagttagggtctcttgagacacaacaagagtagaaaatagaagcattatacaaataaatcaaacaaaaaaatgtgtttaatgccaactgcataagttatctggctgcatgcccaaattcccaacattactttggagtgacagatactgccacaagaacaaagtgtttttgccctggtttcccattctcatttgaggcaactaaatgcagtctcccatgctccattttctgtgggataatgtgctgtacccccatgcattttaaagcattctatttcgtcctataggattagaagttgtcttttcttttttccttagaaatgctcttgattcactatgcagaaagttgtgttcatcattctgcctttgatgattgctacaatgccagattttaggtgcctacccttattcaaagatacttcacggaatacagcatggcacttgtctaatcttcttttacattgttgaataaagagaaaaacattagctcacaacagtaggcattatctgaaaggaaaaaacaaaatatactaattcttgaattgcttaggaagtcatttgaagagatcatgacctagttactaaaatactttaaaaaataaatccatgggcttcattccaagatggctgaataagaacaggtccagtctgcagctcctagcatgatcgatgcagaagatgggtgatttctgcatttccaactgaggtacctggttcatctcattggaactggttggacagtgggtgcagcccaagaagtgtgagccaaagcagggtggggtgtcacctcacccaggaagcacaaggggtcaggggacttccctttcctagccaaaggaagccgtgacagactgtctctggaaaaacaggacacttctgcccaaatactgtgcttttcccaaggtcttagcaaccggcagacaaggcgattctctcctgtgcctggcttggcaggttccacgcccatgtagccaggctcactgctagtgcagcagtcagatcgaaccgtgaggcagcaacctggctggggtaggagcgtccaccattgctgaggcttgagtaggtaaacaaagtggccaggaagctcaaattgggtggagcccactgcagctcagcaaggcctactgcctctatagacaccatctctgtgggcagggcatagctgaacaaaaggcagcagacaacttctgcagacttaaacatccctgtctgacagctctgaagagagcagtggttctcccagcatggcgtttgagctctgagaacggacagactgcctcctcaagtgggtccctgacccccatgtagcctaactgggagacaccaccaagcaggggccgacagacacctcatataggtgggtgcccctctgggacaaagctgccacaggaaggatcaggcagcaatatttgctgttctgcagcctccgctggtgatacccaggcaaacagggtctggagtggacctccagcaaactccaacagacctgcagctgagggacctgactagtagaaggaaaactaacaaacagaaaggaatagcatcatcatcaacaaaaagttcatctacaccaaaaccccatctgtaggtcaccaacatcaaagacaaaaggtagataaaaccgcaaagatggggagaaaccagagcagaaatgttgaaaattctaaaaaccagagcacctcttctcctccaaaggatcgcagctccttgccagcaatggaacaaagctggatggagaaggactttgacaagttgacagaagtgggcttcaaaaggtcagtaataacaaacttctctgagctaaaggagcatgttcaaacccatcgcaaggaagctaaaaaccttgaaaaaaggctagatgaatggataactataataaacagtgtagagaagaccttaaatgacctgacggagctgaaaaccatggcacgagagcttcgtgacacatgcacaagcttcaatagctgattcgatcaagtggaagaaagggtatcagtgattgaagatcaaattaatgaaataaagcaagaagaaaagattagagaagaaagagtaaaaagaaaggaacaaagcctccaagaaatatgggactatgtgaaaagaccaaatctgtgtttgattggtgtacccaaaagtgatggggagaatggaaccaagttggaaaacactctttaggatatcatccagtagaacttccccaacttagcaaggcatgccaacattcaaattcaagaaagacagagaacaccgcaaagatactcctcgagaagagcaaccctaagacacataattgtcagattcaccaaggttgaaatgatggaaaaaatgttaagggcagccagagagaaaggtcgggttacccacaaaggaaagtctatcagactaacagcggacctctcggcagaaaccctacaagccagaagaaagtaggggccaatattcaacattcttaaagaaaggattttcaacccagaatttcatatccagccaaactaagcttcataagtgaaggagaaataaaatcctttacaggcaagcaaatgctgaaagattttgtcaccgccaggcctgccttataagagctcctgaaggaagcattaaacatggaaagaaacaaccggtaccagccactgcaaaaacatgccaaattgtaaagaccaacgaggctaggaagaaactgcatcaattaatgggcaaaataaccagttaacatcataatgacaggatcaaattcacatataacaatattaaccttaaatgtaaataggctaaatgccccaattaaaagacacagactggcaaactggattaagagtcaagacccatcagtgtgctgaattcaggaaacccatctcacatgcagagacacacacaggctcaaaataaagggatggaggaagatctaccaagcaaatggaaagcaaaaaaaaaaaaaaaaaaaaagcaggggttgcaatcctagtctctaataaaacagactttaaaccaacaaagatcaaaagagacaaagaaggccattacataatggtaaagggatcaattcaacaagaagagttaactatcctaaatatatatgcacccaatacaggagcatgcagattcataaagcaagtccttagagacctacaaagagacttagactcccacataataataatgggagactttaacaccccactgtcaatattagacagatcaatgagacagaaggttaataagatatccaggacttgaactcggctcttcaccaagcagacctaatagacatctacaggactctccaccccaaatcaacagaatatacattcttctcagcaccacatcacacttattctaaaattgacaacataattggaagtaaagcactcctcagcaaatgtaaaggaacagaaatcacaacaaactatctctcaggccacagtgcaatcaaattagaactcaggattaagaaactcactcaaaactgcaaaactacatggaaacagaacaacctgctcctgaatgactactgggtaaataatggaatgaaggcagaaataaagatgttctttgaaaccaatgagaacaaagacacaacataccagaatctctgggacacatttaaagcagtgtgtagagggaaatttatagcactaaatgcccacaagagaaagcaggaaagatataaaattgacaccctaacgtcacaattaaaagaactagagacgcaagagcaaacaaattccaaagctagcagaaggcaagaaataactaagatcagagcagaactgaaagagatagcgacacaaaaaacccttcaaaaaaatcaatgaatccgggagctggttttttgaaaagatcaacaaaattgatagactgctagcaagactaataaagaagaaaagagagaagaataaaaaagatgcaataaaaaaatgataaaagagatatcaccaccgatcccacagaaatacaaactaccatcagagaatactataaacacctctatgcaaataaactagaaaatctagaagaaatggataaattcctggacacatacaccctcccgagactaaacctggaagaagttgaatctctgaatagaccaataacaggctctaaagttgaggcaataattaatagcctaccaatcaaaaaaagtccaggaccagacagattcacagccgaattctaccagagatacaaagaggagctgataccattccttctgaaactattccaatcaacagaaaaagagggaatcctccctaactcattctatgaggccagcatcatcctgataccaaagcctggcagaggcacaacaaaaaaagagaattttagaccaatatccctgatgaacatccatgcaaaaatcctcaataagataaatactggcaaaccaaatccagcagcacatcagaaagcttaaccaccatgatcatgtcggcttcatccctgggatgcaagtctggttcaacatatgcaaatcaataaatgtaatccatcacgtaaacagaaccaataacaaaaaccacatgattatctcaatagatgcagaaaaggccaacaaaattcaacaggccttcatgctaaaaactctcaataaactagatattgatggaatgtatctcaaattaataagagctatttatgacaaacccacagccaatgtcatactgaatgggcaaaaactggaagcattccctctgaaaactggcacaagacaaggatgccctctgtcaccactcctattcaacatagtgttggaagttctggccagggcaatcaggcaagagaaagaaataaagggtattcatttaggaaaagaggaagtcaaattgtccctgtttgcacatcacatgatagtatatttagaaaaccccttcatctcagccccaaatctcctcaagctgataagcaacttcagcaaagtctcaggatacaaaatcaatgtgcaaaaatcacaagcgttcctatacaccaatgacagacaaccagagagccaaatcatgagtgagcttccatttgcatttgctacaaagagaataaaatacctaggaatccaacttacaagagatgtgagggacctcttcaaggagagctacaaaccactgctcaatgaaataaaagaggacagaaatgaatggaagaacattccatgctcatggataggaagaatcagtatcgtgaaaatgcccatactgcccaaggtaatttatagattcaatgccatccccatcaagctaccaatgactttcttcacagaattggaaaaaactattttaaagttcatatggaaccaaaaaagagccctcattgccaagacaatcctaagcaaaaagaacaaagctggaggcatcatgctacccaactttaaactatactacaaggctacagtaaccaaaccagcatggtactagtacgaaaacagagatatagaccaatggaacagaacagagcccttagaaataacaccacacatctacaaccatctgatctttgacaaacctgacaaaaacaaaaaatggggagaggattccctatttaataaatggtgctgggaaaactgtctaaccatatgtagaaagctgaaactggatcccttccttacaccttatacaaaaattaattcaagatggattaaagacttaaatgtcagacctaaaaccataaaagccctagaagaaaacctaggcaataccattcaggacataggcatgggcaaggacttcatgactaaaacaaaaagcaatggccaccaaagccaaaacagacaaatgggatctaattaaactaaagagcttctgcatggcaaaagaaactaccattagagtgaacaggcaactcacagaatgggagaaaatttttgcagtctacccatctgacaaagggctaatatccagaatctacaaagaactcaaacaaatttacaagaaaaaaacaaccccatcaaaaagtaggcaaaggatatgaacagacacttctcaaaaggagacatttatgcagccaacagacacatgaaaaaatgctcatcatcactggtcatcagagaaatgcaaatcaaaaccacaagagttgccatctcacgccagttagaatggcgatcattaaaaagtcaggaaacaacagatgctggagaggacgtggagaaataggaacgcttttacactgttggtgggagtgtaaatttgttcaacgattgtggaagacagtgtggcgattcctcaaggatctagaactagaaatcccatttgacccagcaatcccattactgggtatatacccagagaattataaaccatgctactataaagacacatgcacacatgtgtttattgtggcactattgacaatagcaaagacttggaaccaacccaaatgtccatcagtgatagactggattaaaaaaatgtggcacatatacaacatggaatactatgcagccataaaaaaggatgagttcatgtcctttgcagagacatggatgaagctggaaaccatcattctcagcaaactatcacaaggacagaaaaccaaacaccgtatgttcttactcataggtgggaattgaacagtgagaacacttggacacagtgtagggaacgtcacacaccgggccttttggagggtgggggactgggggagggatagcattaggagaaatgtctaatgtaaatgacgagttgatgggtgcagcaaaccaacatggcacatgtatacctatgtatcaatcctgcacgttgtgcacatgcaccctagaacttaaagtataataaaaaataaataaataaataaaataaatccatggcagaagcacttttcaaagcaacagcagtattttagctttttctcaaacccctggtggttgtgtttcttcctcatgatcacaactattattcttggttaaaaatctttgctttcttgacatttgtcagcaacgtttggtcattggtgtttgttgaatgaatgaatacagaaaggtcaatttcctaacaagttatggtaaaatctgagagtgatcttcttgtgtccagagtttctatacatgttcctgctggagtggctctagggtagctgagtgagcaactctccagttcagtattgcccatctctttggatgcagagcaaatagcagtgcctaggtaacctgactgcttgtatgctggtttccaggcagtgctttcaatagatctccataggttatagaaaaaaatttttgtaataatatactatgtagcattttaagttttattcctttaatgcatgtgtgtcatgcatacacatgcattcccacatgcagtggttggtcacctgcaaacctacttttttgctattccctgtgcttacttgaaaccatttagtccctttcattcctgtggctgatagaaacaggaaggccgtttgtgatggttagaacattttctctctctcttccagcccatctgatcccaaataatatgaagcaaaactgagatctttatatttatgggcaaaaatactgtctcctcatcacaggccatcactgtcacttcaccactaggtggccactgcccctcaaggatcagcatccacatagcttggggtcccgtccctcctttttccaaaatacagaagtcgatgagctcaataatagaaagaaaaaaaaagaagagtgagaggagtgagcctagtcatattgctataaacagaagtatttttgtttttttccatgcttaaattatgtctatatatataaaatgtaaactttactgttgtaaccattaagtgcatgacattaagtacattcactttgttgtgtacccgtcactgccacccacctctagaactttctcattttccccaggtgaatctctctacccattaaacacaaactctccatcccccctccctgtttgttttcttgtttttaatacatagggaaagcaaggaaatgcgagcacaccaggctaagatttctatggaaaatagcaaagccatcagccaagataaatctatcaagaataaagcagaacgggaaaggtaagtctgagagtgttcactgcaggaatatggcattgacttgaggacacagtctcaactttctttatgtgtgtacacacacacacaactgagacagcaaaacacttgtggcttttgactaggaattctgctattataactgcaatggagatttgttattatcactgtagaacaatcgtccacattttctggttgcttactaccaccagtaaaattagtttacattcaatatatatgtgctgctttacaaacaaagttgcataaaatatgacataataatataattcttttttttattttattcatttttttttttgcttgtttgttttgagatggagtcttgctttattacccatgctagagtgcagtggcacaatctcagctcactgcaacctctgcctgggtttgagcgattctcctgcctgagcctccctagtagctgggattacaggcatgcaccaccacacctggctaatttttgtatttttaggagagatggggtttcaccatgttggccacactggtcttgaactcctgacctcaagtgatctgcccgcctcagcctcccaaagtgctgggattataggcgtgagccactgcgcccagcctataatcaatataattctgaagcatccttcccaggttccactgggtcattctgcaagcctctcccctgctcaggtgtcagtccgttctggatgggccagttctgaatagcagcaacagtcaggagggcggtcttcttcagtagtccttcacatgggatcatcttgaaagcccccatcccatttgtctcatttgtccttatgttaggtgagttttctggaagcagatcaaggcaggaattgatgtgcttgtgattcactgaggaagggaccttcagagaaagggagtgagaaagcaggaaggcccagggcaggccctaagcaaggatgtggtctcacctagggtcccagtaacctcaaataaaaaattccaccacagatttgtccctctttgaagcaagagtacctggcttttgtgtttccatattaggcagtcattggccgcctgagactggggggaaggtttgtgtgtcctctatagaaggtgccaagtgcaagccctttagacacagctggtgaaggggatctgaggagctgtcaatagtcatgttacccaagggataggcacttaattcccagcgatcaccagtgctgcccatcatccacctcaaggaacatctgagaatacaaatgctatcagctccataaccaagagcctggattacgccaccagcagttagggacagtggggttccttcttttgggggaataatacctagcaagaaggtggccttttggccaaagtccaacagagaaaagctgttttatgagccaggtgcagtggctcacacctgtaatcccagcactttgggaggccgaggtgggcagattacctgaggtcaggagtttgggaccagcttgaccaacatggtgaaacctcacctctactaaaaatacaaaaaaattagctgggtgtggtggtacctgcctgtaatcccagctactcaggaggctgaggcaggagaattgcttgaaccccaggggcggaggttgcagtgagccgagatcctgccattgcactccagcctggccaacagagcaaaactccatctcaaaaaaaaaaagaaaagaaaaaatgtcattctctggatgttattctcagataagcaactttgtttaagggccttatatacatggaaatgacaccttcttcagtttgaaaacaccaaatattccagccatgataaaacctcatgaatttgaactgttttagactatccaaagtgaaatatagaattaaccatgacaaatgtgccaattaatagctttttaccatctttttcaaatatgttacaaagtagactttagctcggttgaggtcaaattatcttcaatttggagttactgctaacttaattagcaagggtcttaaaaatttatcttattttgaaaactgtacttatttgttgtaactttctatttttatttgtgcaactgtatgggggtacgtgagaaaactttacatgtatacaatgcccagtgatcaagtcagggcatttaggttgtccatcacccaagtactatacatttgtggctaagtatagtcaccctactctgctatctcttataagtttgtatccagtggtatgtggttccaaaatatctacaaattggctgttttttaaaaaataatttttctataccaaatgatagttatattctaaacccatactgtgtgtatgtttgtatccactttatcaaactgaggagaaataaaatttaaaaatttgtcatagcactaagaaagatacatagaaactgaaaatcatacttacatttttagatcaaagaagacattttaacagaaattacccaatatttataactgaatgacaatgtaaacactatttatcaatgtgtagagggtagttaaagtgatatttggagggaaaaatatagcctagatgcatatattttttaaaagatgtgaaaattaatgagctaaccactcaaagagaatatgaagttggaaaaacagagtgaacccaaagatctctgatggaaagaaataaatttaaaaagcaaaaaatactgaaatagaaaacaaaatgcaatagagaacattcagaaaaacaaaagcttatttgaaaagaataataaatcagttaactttcaccaagactaaagaagagagagaaagcacgaattagtgatgttaggaatgaaaaggggaattaactacagagaaaaacgctttgaaaaactaagtctactattaaaaaaaactaccaataaatttgaaacgttagatggagtggagaattgctttgaaaaatataaatatccaaaactgactgaaaatggagaaaacctgaacagactggcaattattacagaagttcaagaagttataggtcttttcactcatgaaaaacactctacctcaccagtagtcagggaaatgcaagttaagacaataagctccattccataggagcatccaactgacagaaagtctgatagtactaagagtgggcaaagatatggggaaagggtaacacccagacactgcagatggaaatgcagttggggacaactggattggagtaaggaagagcctgttcgtaccctgccaagtgacaagtctgagtatacaccctacagcagcctttgcctgtgtgcacaagaagatatgcaccatacttcatccactcatctgtttattcaacagacacttattgtgtcaggtattacagggcccacgcacccgatcgttgtagcgttgtttgaaaataacctaatttttgttaatggcaatgaggaaatagtgtagtctgttcataaattgaaaagtccatacagcaaatgaaaataatgaagtggtctggaacataggtgtatctctaaaacataagactaagtggtaagctatgggaagaaacccagactatgttactctatgggtacatttagaaaacacaggaagcgatgccactgtgcctggccagcaacatcagcatcacctgggagcttactagaaattcagacctcccaccccaggcccactggatcaaagtcactaaggggaaggcacaacagtctgtggtttttatcatctctccaggtgattggtatgcacaggaaagtttgagaagctcttatattacacatgggcacatctgtatgtggtttaaaatattaaaacatgggtgagaagatccacaccaaattcacaatagtggtaacctctggggagagaggaataaggaaaactgaatcaggaagaatacacatggggctttaattacatctggaactgtttattgcctttaaaaatgtgagataaacatggcaaaacattaaaaatatcagttaatctgagggacacatacacagatttttaaatattcttctctggacattatatgtttgaaaatactgcaataacaattagaaaaataaagcaataattccatccagagaatttgatggaatatagctctttattatttgatataatattaatttcattcaatgtcataccaaccgttatttgtgcccattgcttttaggcgagtcagggagttaaacagcagcaacactaaaaagtttctggaagaaagaaagagagtaagtattttattatatttttggcattcttcctttaaaaaactataaacaataacatgcttagccaccagacctctagctaatttgtttaatttgatttttctgtacattaaacattccagcttctctgctccctgaaagctaaaataatgtctcactaaaatctttaaggtaatgatttggcaccattttatacagaaaatgaagccaggtttagtcatgcgtaagtcctctattattttctaagattttagcaggaaagatcttcccagaaataattatgagtttaaactctccaaattttgagatgattttttaaaaaattattatctctttcacttaaattataaagttacaagtcatctctcatccctgttttaagattgtaacccaaagttcaatcagaattttttttttttttttttttgcagcttgccatgaagcagtccaaagaaatggatcagttgaaaaaagtccagcttgaacatctagaattcctagagaaacagaatgagcaggtattttacctaaaatacgtaaaaacatgcaggcagctagccagctttgggatacacatgccatggcccacagtgaccagtggcttgcatattgtaattgaaaggtagatagaagaatttgttgcccattactatattttctccattatatccaaaaagaaaagaaagtaccagtttttggagcaggagcagaatctggctgtgccaaaaaaagaatatttggataaattatggggattatgtgaattctaagaatgaaattactaaaagtgagaggatgaaaaaaagagattacgaagtatttctccattttcatttagagttttataatttgcaaactataggcaagggatatgatgtttaaaagcaaatgagagaaaccacctattttcaaactcaatctgaaaacgaagtttaaaaacctccctgggacttacaggtggtatctaaagtcatgagcccccatcactctacaaatcactgagcatgagtggataccatagtcttggtctttttccctgcaagacaagacactaaataaagaaatatacacaaataaagagttatccaggccgggcgcagtgggctcatgcctgtaatcccagcactttgagaggccgaggagggtggatcaggaggtcaggagatcgagaccatcctggccaacatggtgaagccccgtctctactaaaaatacaaaaattagccgggcctggtggcatgcacctgtagtcccagctactcagttggctgaagcaggaaaatcacttgaacccaagaggcggaggttgcagtgagccgagatcgcaccactgcactccagcctgagcgacagagtgactccatctcaaaaaaaaaaaaaaaggagttacccaaacaccaactgtttagttaggccaatgggcatataccagcaccaaggtaaatgtatttttatctggtgcatagtacaggtgggcacctttccaaatgggctacagcccatcagccttctacagtaacctttaattaatggaaatccctctagttcctatggcaacaagaccctcagttatcatttacatttcagactctctcagttcaaatgttattctttaggtgtagttggtatagaagttattattcctaggtaattcaatttagaaacggagaggttttgatgaaatatgtacttgtgccacattattccttcctgttttctcccatctataaaacaatcctatttaaggaatacttttttccagagtaaatgactccccttgaagaatacttaagtaggaattatactaaaaagtacctttgagaaagtaaaaataaaataaaataaaataaaataaaatcttttttgtatggcaattgggtaacagataaatctgacttctagtttcagattctttactttttggtggacagaaattttattcatcaacatacttcctagttatgtttcccatttccttttcagctaagtgcttctattcataagcaagtccactccaaggggacaatacatggttattgtcccacaggtacaattcatttgaccaactcataaacacatcacattctggtacaagttacctagcttatgtttttgctcttaaagcacttctcagaaagtgctcctgggggaaatatgggaatatgagtaaggataaagtcaccatctccaaagctttagaagccacttcagtgattcaacaatgggtagggataaggatgccttggagaaggtttttaaaaattctccctagaggaagggcacagtgaaaggtaaggcacagttatgtgttagttaactaaattaagaaactacttggaaattaattgtgttgcttagcaacaagtttgactaaagaatgtaaatgtgctcagaattactcatcactacaatagtggtgtatgccagagctagagaaaacagtcatcttgtgtcgctagctttggagccgaagtacataatttttaaaaatcagtttgagcttttatcctaacacatggctaattcaagccacaccagagttcttgcattaaactgctagattagtgatagctgtattgattagattgtattgggagggtgctggctttttgttgcagaaattcaaatatgtcttttaaggtctaccacccacaactgacactttgagtcacaaaagcttgggaaagcatagaacatgaaaaggcttgagacctgataaagatttaatgagattcaaggaaaagacattcaagatatcatactgatgcttctggcaagcaaagaatttggacttgagtttctgtgttaagctttgctttagaaatatggcctgttcaattgcaaattcaatcccagatctttctagtatacattttttggcatttaagggtgagaaagctctcaattcacagttactctgtatggtacaacactgtcatgggcacagtgcaaaagatacagtgacttcatttctttcctcataaaaaggcaaggtctggaactatatagtataactgccttcataaccaggtaaacatttcatcagcaagaacagttctttgtctccagacaatgcaaacttctacaacaatcttctaaataattgttaaatcccaagacattttttctaagccagagataaatgtaaacattctcccatagtatttccctcaaaggtttctttctgttctcctgtgaccctactcctaatcggtgtcccaaatctccccttccaaagcaaggcctggaatggattcagtccattagctaaaccagtgttgggggcactggcagaaacaaaccaggcgtcagtatgttttggtcctgattctggatcctcaccttctaggttatttgtaagccactttatgtccttgcctacttggtcagccaactattcacttaacactctgaaggttggggatgtttttcctacttgagttttttcatagacttcccagctacacagtatatctcatctgtcttgacatgtaccatttcaaacattaacgactccattactgtcacacactcgagtctcaaaaattgatttttatcatcaatcctatcatttaataaagagaggtaaaaggttttgcttaaaggccaggttctccacttactgccacagaagagaggcacagtctgggaatgacaggcgttggttgtttgtttcgtttcttttttttctgttgagatcaactaggggaaagtttgtcactgaggggtgtgtacatgttttatccttagctttttgcttttctgtatatggttttgcattcatttttcaaattcacttcaatattcatttattttcttcgttttgtatgtatgactcaattttgacattactatttttgtacaaacagcttttgaaatcctgtcatgcagtgtcccaaacgcaaggtaggaccgaaactctgataagcaagacgttgctttccttctcgactacgtccgtattctctgtgcagtctccatttatgagtcacatctggtcataactaatatctgaagggtttggatttaaaagcttgactattccatgcttggatttctgatgtcatattcatgccaaaatgccctaagtctttagagaattacttctgagggtatttgaacctgtattttctattgcagatttaggaaacagatcatggtaataaagacataaccagaacagtgatgtgcagctgtcatttggactgaccagagctaagacagggtcacagagtcaggtcactcacaaatgttaatatgactccaattaatttttaaagcgctcgctgaaagttggttggtggtttttaatgatggagctgtgctgtgcatgtagaaaccttacacgatgactcttgtcatgctctctgctaagtcccatctgccaaagaccctaatcactcctcataagtaaggtggtcatataatttattgtccataccaggatagttttgagagtgaaaggcagctctgtttataatatctaggactacaggcataaactggaattgcctcagacaaatgagaatgaatggtcacccaactcatataagaacttagctgttggaatagtcttgtaatgtcctatgattcttccttctacaccgtggtcaatactttcttcagaagctaaagggggacaagcacagagaatcatttgctactatttaccgaacttggaagtatttaatttccagtgctgataatgtttcactgtcatcccttttgaatactgtttgtgtcatagtttcatgtttgtatatttttctccatttcttcatttctctattagagtattactatactttaggcataaaaaatatctgggcagagggaaccaaccatcccaaatttacacagaaagatttaattctttggtgttattatatccatcctcaccaaaatgaagcttaacgccaaaatatagaagtaagaagaagaaggaaatcacagtatagtctgtgggttaaattaattttgtcacaagaattcatttggaagatgcttctcatatatctacagagttgaccaaatcccctcccagtgaccttccatttagttggaatatctaagcagacataaatagtaacatcagggcacttcagaatcttcatccgatttatatcttcataggtccatgtttctattttcaaatgtcctttatttcaaagcagcatgtcactaaaaaaaagaaatgggcaatcatcattcctcaaaagatacgtgcatttggttgggcaaaatcatccaggctaccagttggataataaaagtcgaaatgtactatttgattttttcctatgtttccaagcaagtatttctcaccagacactgcccccatcatatcccctttcctcttctcgaattagctggttttcttagtgacaatctgaactcatgaggttgaattcaccattgcttacttcctggtagtccataaaaagtaccctagagaagtaagagcccacagggatagagtttgcacaataagattcctgaaagcctgcatgttcctgtaacattccatttacagaagactccagccaatccaatgtaatatgctctcacctgaacttctctatcaattagatttttagggaattacttttaactaaatttcaggctatttaggaaataagttgtacataagcaatacttattctaatgtgataaaattatctacacacagtcaaagcaacgtgtcaatctgtagaaactaaatcaaacagtttgtggtatggtctaaagataaagcaagtggtctaccctcttctcaagtggttctcctggcactgtgtaaaccagtccccaaaatttaatgtgtataaaaacttcctggagatcttgttaaaatgaagattttaactgattcaatagatctggggtagactccaagattctacgtttctaagaaggtcccaggcaatgctgatgctgcttgtacatggaccatattttgagtagcaaggatgtggtgacaggatcatatttatgggagaagagaggccagggttgttaagtgccttcagataaggatttcaacacacgtaaggccatgtttctgatgttataggcgaaggagatgcagcagatggtgaaattggaagccgagatggaccgcagaccagcaacagtagtatgaaactccaaaatgcaaactgaagcagcaaacccacaaagcatcaaaagactcactcacaaacttctgaacacaaactccatggatgaaagctgtttattttgtttcctttatgtgtaaacaagatgatatctgaaaccagagagacttggaatgtctgactgacttctatttaacagcttgagtattgcatttccttggccaaacaaaaatagctacaaatccacaaaaatttactattccagtaaggcagagtccaaccattgataatacaacttaaacatgtttgctataaaataccatcacaagtaaatgagcttggtgtgaacaactctcctttgtgatgccttaggacatgtttgaactgcagcaaaaaacaaaaacaaaaaacagtgcattagcaatttcatagcaagtgcatgcactaggaaaagaaaactctgtctacaagtttattagcagaagtggtggtctgctagacaaataattttgcaaaatttttctacatctaagttacctcatcagtaagtgccatgtctctaccatgccatcagaggctaatttcctgtaaaagttgtggaaattgttagaacaatagaaaaatagagcagtgtatgtgtgccaaaactcatcattactcaaaggagaactgtgttaggcacatttaagaaagtttacatctgacattgctttataggaattgtttctgcagattccggatattataattcacaccataaagattgtgaagtggttattggcaaacgtttgtaaatgtgaccatgtataaagtatttatactctttaattcacactgttagagagcaaaatcatctaagtattgccacatgacaagattagtaaacaggaatactagaactatgtttgcatgatacacaagcaccaataaagactaatccatacacagttaacctaatgccaaataaatactggttaaataaatgtatggcacagaatataatttgactatcaagacttttagcataatgaaaaaccctctctctatatatatatgtgtatatgaattatgtgggcattcttgatacttcaagttctagtttgaaaaaaatacataactaatttaattttacacaaaaatatttatgcagattttcagaatttcatatcaggaaatgacctttttatgtctgttaaatatcaaaacaatttgctacagtgttaatctgcatggtctttaagcctgctgtagttgagttgcagacagtgcatgaaaaagtattccgctgggaattgagccatgccaccaaagccaagaggagcgcatggaaacccggtagtctagaactaatcagattactgattttagggcacagcaccagatgaattgttgtatatgcttgtaaaaattgattctgtgtgttcctctgaacaaagcggagaaaatgatgataccatcaatattgaaattaaacttccaacttctctaataaaaaattaaaacacgcataacactcgtcaagagtatttgctcccaagacacattctagcaaatgttttgcctttttcatatacatgatatcatcgttattttcaaagggggcttattaataccctcagcatgtttttcacccaaatgatgcaaaacatgcagattctagttgacttcagttgtaatagacttgtttttctcctatttatgatttgaagtggattctgtaaaatatctcttgttcttagtttccttatctgtaaaacagtggagttagactacatatcttttggcactaacatctcatgaaaaattatggttaataaaatatcaccacatttggattgccaattttcaaagattctgagtggcttctcatcatcaaatcaaatcaaatccaagagctcaactatgctcaccattctgtaacacttgactgaattcatcacttgcctcctcttgtttctgctttggagaggtactactagtttttccatttttcttatttcttccctcttttcatcctcctaggccaccataagcatttatattttccagtgttatacatggaaccagtttgtttttctttgatccaggttacttttagtatttgagacatcataccattaatccattgtagtaggattaaaatgtacacacaactcaaatgtgcaacaaaagcatgtgttacctgctattgtcagttcatattgcactcaaaccttgcattatcccttattatgaagaaaaattaatagccaattaaagtaactcagtgtcttccagttttgtttttttttttttaaaaaaaaaaaaacattttcagggacatgtttagttacttgagagtcaaatcccctgttagagatccctccccattcaggagatcttgcttttttccccagatggcatctgggtatgagggaagctcacgtgtccacctggcaattggtaggagcatctggtttccccattgttggacaggtcctaactgcactctactgcagctttgcaaagtgggccttcccaccccagtggttcaaagtccctgctcagccaagtcctcattctggtatcagtttattccagcattcttctgggatatgcagaacttccaggtctttgggggctgtgcaggaaccaaagatgctgtctcaggtccatccatcaaaacactcctttggtcatttgtcagctactagggccatgtagtttcaataccacagagttttctaaatccaggaggcttgaaatgttccagagcaatgccccaaaaagcaagaagcaagcaagctttatactgccccaagactatctgggtttctacaacatcttgcttctcccaccatcagaactttttgttcttatttgggagccagggcacttgagtctcaattcttacctttattctttctttcagcccagaaaagatactcaactcccattcctgactgatggaatacccatacagtactatacttctcttttcctaagtaggttgctcttcacattttgggggaataaaaggcttcatggaaaaagagccaggttaccaagatagggaaacacatcagaaagtaccatctttcatcaaattgaaggcattattgattatagcttatactattattttatataccacacaaaatgaaacacactgccaattaaactataataccctatccggtgattgtcaaggcacatcccaatttcagagatgttaaaatgtgaaaaatacatacatcttggaatccatgaaatatgtagtattccaaaagtagtatacaaactcctcaaccctaagccttaaagaggagaggaaattttaaagataggacacaagagaatcattttatcacaaaactgaaactggttttgtggaactgaaaaatggttccaaaaaggaaccattctgcaactgagtttcaaatttagcaatgagcttcctggaaagcaattcaaaaaggggaagaaatctatctttcaccgtctttatttgaagaatcttgtttcctttagctgtttctttcaatcacatgcctttgatttctacttctttgcatgtaattctcgaatctataattctagcctttacctttctttcccgaagctctgactctccctctcagattgtcaatagttaaataggcggccatgtgcacattgtatgtgattaattaaaaaaaatagagactctttctccatctgtcctccccacatattttaatagtccataagcagtgctaaaccttgtggccatctttttctgctccatctcatttcctccagcacccaatctgttcataaaacttatgaattctgtcctgtcttggaaactttcttctccttccttataactcaacgttcagaattttaaacttgctgttcaatttctttgccctccaaatcccttttacacagagattaatcttcccaaatgacacctgcaatcatattaccattctgcttgtaaatgcagaattcctgtctactgcctaaagaataatgttgaaattagtgataacagcattcattttctgcccccaacatgcctactcattttagtcaatatgaatttatcactagtctctgttcacatacacatagtacacatcttttctagccacattacataataatgttctattaagtcttgaaaagcaacttccaaaaatgccatttctgaaaagttctctcattctcccaagcaagaagtaacctgccctttttcatttatccatttatactttaaaagctatttaagcataagacttttccaccagtcctgactaatttcttttcaggctttgttcagttgctcttcaaagaagaggtagtcactagatatcgaattactaagttattttctatgaagtaaaataaccatctgtatagactcttgggcaggaaatgcctttgaaaacttaatgaaaacctaaaagaagcttttttgcaaagtgtcttttcagttccaagaaaaataatttttctcaatacttattgttagcatacttttaaaacagtgcaatgatcacagtggccatcacggatctaacagtgtggatccatcaacattaagagattatggagagtgaagaaggaatacccctattattttattgctgaggttatcttagggacgcctcgttcaaaactctagcttctccttcttcatcacttgtgcaaatctaacagaaggccacacatttctacaactcttctttgatgcttgacgttgaacggaatctcaagcacatattttaattgcatctttaatatcataataaatctggtgatacctctgggatgaatatttatgagccatcttctttaataatattttgtggaaaacgttctgctccataggttagaataatgaaaaaatattaggcgggtggggggagtagggagatggttaaaatagcagcatcattgcttttacattaaaaaattggtgtctacactgtacttatcgtgataaatgatgctgtgccttttccactcctttcctctcctagcattaccttcttggaagttcagggtaaggggcaatttctgaagtacttcatcctggaaatttttgagtgtccagcacaataaaattaggaaaaatttccaaggaaggccaatttaatattgtatacctaatcacttgcatcaggactcaatagctttagatgaatcagaatgtaccaaaaacaaaacagacagaaaaaggatttgaccatctgtcatttcggaactttgatatcatataatgtgaatgaggaaatgttatactgatccatcaaaattgtttacccttttcaagcaattcatggattttctcaaaattcacatgcagcttttaacacttctatcttttgtttttccttagacaaatcttggtattttgttagggtgtggtatttgttacagcacagcatattgaaccctacagactgtacccctgtattatgaattcacttctactacatcaagtagccatataaatggttatattagacatttcttcagcattgaactaactttatttgttcatggattaaatatttattggaaaaccactcttaacctctctacccttgtaacccagttccaactcattctgctcaccacacaacagccagtaagtagagagacaaggagttggaacaaggaaggtgactttagttcaaagagccagaaaactgagaagatggtggactagcgtcctaaagtaccatctttggtcagtactcatttcagactctttatgttaagggtggtgggaagaggaggagttgggatcaagaggtgactgacaactgcagacatttgagtgccaacaagggtctgaggaggttggaaacttctttgtctttgtctttagccaagtcacaatgttcctataaatctttaacaaaacatagttgcttacatactctctctttaatcccagagtacaaatacaaaatggctatttttgtattttatctgtgtgcccaaattagcctagcctatgtgcaggaacaggaaaaggccccttaaacaaaaatggggtcagttatgttcttttagtgtttcactgttacacacttccaactttttctcttttcttttttttttttttgagacagagtgactctgtcgcccaggctggagtgcagtggcactgtgtcggctcactgcaacctccgtctcctgggttcaagtgatcctcctgcctcaacctcctgagtagctaggattacaggcacgcaccaccatgcctggctaatttttgtatttttagtggagatggggtttcaccatgttgaccaggctggtctcaaactcctgacctcaggcaatctgcctgcctcggcctcccaaagtactgggattacaggcatgagccaccgtatccagcccttcaacttgtttttttaccagtaatgcactctattttgaaaacttatcaacagttttagctttaggcgatattcataaggtagatgggtggcattaatggccccaattttttatgcacaaaattatttagaacagtgtataaaattaccctgaggctatgtgtatacagtgtaatgacacataaatatattttgtgtttggacttggatcccatccccaagatatcttattatgtatatgcagatattccaaaatctaaaaacaaccgaaatctgaaacacttctggtcccaagcattttggataaggaacactcaagctgtagcagcaaactggacacgagtggaggcacatttttgtttcttcactttaagtctctgacactgccgtgagagcacatgagaaggctggcctgctggcgggtatgcgcgacttgcagagagtggagttatctcgttcattttaccagctgacaatagatgtgtgagcctgcagctgagatcagccatgcctttcccagagccgtgggaacacccagccaacctataaccatatgagaaataggaaatggatgttgatttgagccactgagttttgatattttttgttatgtggccataactaactgatacagccaagctctgggaacaggaagatgataaaacagtctcatttcaaagtcccagagactgcagctttcaaaagccactggaatcacctacaggcacggaacatggttttctcagggagtgattccagctgctaagcctcatgtttgatgtctcaggtttctttttatttgtaaccttctgagtgtctgctgttcacttcctctaagctggactgctgatgatttcaactaactttgtcatttgacaaacacctcctcctcctcatcctcctccccctccttcttcttcctcctcctcctactccttcttcttctttcttctttgactttctccctccccctccctgtcttttcatttttttggtttgcttctaaaccttctctctttttcctttgggctccctggtcactcaaatgacctcctgccacagtcttggatgctaatattaagtagctgctttcggactggtctgtttgagttatgggtcctaaaattgcagataaacggggaattactttaccacattactttgtccaattgcataaaatatgggacacagattttttaaatgcaatagtctagcaatggaaatatatggtattgagtagttagactgattttaaagcaaaattcttaaaagaaaaatataggagcatatattaggtattaataagaggaatgtatttaaatatatttcgaataatttaaaagtatattatgctaaataatatatgctgaaataaaattcagcaaagtaaaaatattttctaaggcttggaagtctattaagctaaacgtctgccaatcttatgtcccagcaattacactctaagagtaatgagtgtaagccagacatggtgatacacacctgcagtccaagctacttgggaggctgacaatataattcaaggctatgcctcctctttaatcccagagtacaaagtagtgttctatgatcgcacccaagaatagctaccacaccccagcgtgcaatacgtaacgagaccccatcttaaaaaagaagaagaaaaaagaaaaaaagaaatgagtgtattgtgtatgtgttcatcaaaaagcatgttctttattcataataataaaaagctagaaacaaatcagatgtgtaccaataggaggatgcattgatgaaatgtagtatattcacagggtagaacacatgaaagtacttaccttatgattccacatacatgaagatcaaggaaaggcaatgctaatcttgaaggaagtcagagtagtggtcctctctgaaaaaaccttccaggatgatggtgatggtctatgcaagtggttctcgaagtgtgtatcaaggatcccttggcaagccattgtgtcccccaagagactgtcagagggtctgtgtagtcctcttgtttccaaatccgtctctgtgggaggccagatttcttcatatactgcagtgaaaatgacatatcacaacagaccgaatgaagaaaaagacattagaactcagatgacttctgtaaagccatacgttaaagacatttgcaacaatgtaaaacaatgccactcctcccaccaacttttagaaaatacagttatgtttcacaaaaaagttattgtaatagtacaatattggttatatattaacaagtgacagttttgttatttttattgaattgagaaatattttgaaattcctgtttcaaatttttaacatagtaatgcttacagatataattcacataaacaaactctgagttttttaaaaatattaagagtgttaaggaatccctgaggccaaagattttgagaactgctggtctataacttacgctgcgtggaggttacatgggtgtttatacaggtaaacattgatcagggaatcagggaatacacctaagatttgtgtcttccattgcatgtataattctcaattaaacccatgttttaaaaatatagcaatagatatatgttcatggtataaagagaatggggggaatgaaatataatttagtatacaaaaatacatatacacattcagaagaccaatagggatgatgccaaaataacaaagtttacttctgaagcctgttgcctagtggaaaccatcgaagaggcataattactcagaagagttttgagcataaaattaattcagcaggctttgctgctccacaaggaaactattctactcctctcaaaagcctgtgctgagtgagggaggcagagttggatgtggaatagactctctttattcttcccttctagcattttccatgccaactctccaagtctgcaacagaaaatgatttgaaacaatacaagagtaacttaagagagagcctctcacaagggacaggaaatgacacacccgagaaaaatagcagaaatatccacttaggaaaggtggcagctgtcagattaaagagaacccagatgatgaatttggcataaattctcccaaggggatctgcagtaacattaaatgatagtgcaaagcaaaatggaaatgggtgcaactgggatcagctgagatagatgaaactttctacttgtagaagtcagtgtggcaattaacagtctaatttgggatcccactgactacagcttagatcctaactccgctattcactaactgcggacttcaggcatcctacttaatgccgcagaattggagctttccatctgtagaatggatgtaatgccacctacctcatggtgctgctgtgagaatcaagttagcttttgaatcatttaatacatacagttccaggcatatcctaagtgttcaaagagtggtattttgaagatcatttgtggctgtgtttacctttttagctgagaactcctcttcatcttaatacatactctatagaaactcttttaggaattttaaaataatatcatgtcattatttttgcatgatatataaaggtatgattttaaatatttggaaaaatgtattagattgatatacttttaataattggttagcaaagttcatttcaataagatgtttaatagagtaatattcattagatacctctgaagagacaaattccaactttttcagtataccaagctttaaaggaagataatacattttatttattcatttatcagttaatagatatttgggttgtttctgatttggggctattatgaataatgttgctatgaacattcacatacaagtttctgtgtggatgtatgttttcttttctcttgggtatatacctaggagtagaattgctgggtcacatggtaactctacgtttaactctttgaagaactgccagactgtctcccaaagtggctgcgtcatttcacacttccaccagcagtgtatgaagattctgagttctctacatctttgtcaatacttattaccttttttattatagtcatcctagtgtgtgtgtcgttggtatcttatt

SEQ ID NO: 801 - DNA, 3939 bp, Homo sapiens
atggccaaaccttatgaatttaactggcagaaggaagttccctcctttttgcaagaaggaacagtttttgacagatacgaggaggaatcctttgtgtttgaacccaactgcctcttcaaagtggatgagtttggcttctttctgacatggagaagtgaaggcaaggaaggacaggtgctagaatgctccctcatcaacagtattcggtcgggagccataccaaaggatcccaaaatcttggctgctcttgaagctgttggaaaatcagaaaatgatctggaagggcggatagtttgtgtctgcagtggcacagatctagtgaacattagttttacctacatggtggctgaaaatccagaagtaactaagcaatgggtagaaggcctgagatcaatcatacacaacttcagggccaacaacgtcagtccaatgacatgcctcaagaaacaagaaaacataatgaacaataactggaatgtgtgtttctttcttttctgccctagtattactagaacatttgcatcgggaaaaacagaaaaggtgatctttcaagcactcaaggagttaggtcttcccagtggaaagaatgatgaaattgagcccacagcattttcttatgaaaagttctatgaactgacacaaaagatttgtcctcggacagatatagaagatcttttcaaaaaaatcaatggagacaaaactgattatttaacggtagaccaattagtgagctttctaaatgaacatcaacgagatcctcgattgaatgaaattttatttccattttatgatgccaaaagggcaatgcagatcattgagatgtatgaacctgatgaagatttgaagaaaaaaggccttatatcaagtgatgggttttgcagatatctgatgtcagatgaaaacgccccagtcttcctagatcgtttagaactttaccaagaaatggaccatcctctggctcactacttcatcagttcttcccataacacttatctcactggcagacagttcggcgggaagtcttcggtagaaatgtacagacaggttctcctggctggttgcagatgtgttgaacttgactgctgggatggaaaaggtgaagaccaagaaccaataataactcatggaaaagcaatgtgtacagatatcctttttaaggatgtaattcaagccatcaaggaaactgcatttgtcacatcagaatatcctgtaattctctcctttgaaaatcactgcagcaaatatcaacagtacaagatgtccaaatattgcgaagatctatttggggatctcctgttgaaacaagcacttgaatcacatccacttgaaccaggcagggctttgccatcccccaatgacctcaaaagaaaaatactcataaaaaacaagcggctgaaacctgaagttgaaaaaaaacagctggaagctttgagaagcatgatggaagctggagaatctgcctccccagcaaacatcttagaggacgataatgaagaggagatcgaaagtgctgaccaagaggaggaagctcaccccgaattcaaatttggaaatgaactttctgctgatgacttgggtcacaaggaagctgttgcaaatagcgtcaagaagggcctggtcactgtagaagatgagcaggcgtggatggcatcttataaatatgtaggtgctaccactaatatccatccatatttgtccacaatgatcaactacgcccagcctgtaaagtttcaaggtttccatgtggcagaagaacgcaatattcattataacatgtcttcttttaatgaatcagtcggtcttggctacttgaagacacatgcaattgaatttgtcaattataacaaacggcaaatgagtcgcatttaccccaagggaggccgagtcgattccagtaattacatgcctcagattttctggaacgctggctgccagatggtttcactgaactatcaaaccccagatttagcgatgcaattgaatcagggaaaatttgagtataatggatcgtgcgggtaccttctcaaaccagatttcatgaggcggcctgatcgaacatttgaccccttctctgaaactcctgttgatggtgttattgcagccacttgctcagtgcaggttatatcaggtcaattcttatcagataagaaaattggcacctacgtagaggtggatatgtatgggttgcccactgacaccatacgtaaggaattccgaactcgcatggttatgaataatggactcaatccagtttacaatgaagagtcatttgtatttcggaaggtgatcctgccggacctggctgtcttgagaatagctgtgtatgatgataacaacaagctgattggccagaggatcctcccgcttgatggcctccaagccggatatcgacacatttcccttcgaaatgagggaaataaaccattatcactaccaacaattttctgcaatattgttcttaaaacatatgtgcctgatggatttggagatatcgtggatgctttatcagatccaaagaaatttctctcaattacagaaaagagagcagaccaaatgagagctatgggcattgaaactagtgacatagccgacgtgcccagtgacacttccaaaaatgacaagaaaggaaaggccaacaccgccaaagcaaatgtgacccctcagagtagctctgagctcagaccaaccaccacggctgccctggcctctggtgtggaagccaagaaaggtattgaacttatccctcaagtaaggatagaagacttaaagcagatgaaggcttacttgaagcatttaaagaaacagcagaaggagctaaattctttaaagaagaaacatgcaaaggaacacagtaccatgcagaagttacactgcacgcaagttgacaaaattgtggcacagtatgacaaagagaagtcgactcatgagaaaatcctagagaaggcaatgaagaagaaggggggaagtaattgtctcgaaatgaaaaaagaaacagaaatcaaaattcagacgctgacatcagatcacaaatctaaggtcaaagagattgtagcacagcacacaaaggaatggtcagaaatgatcaatacccacagtgctgaggagcaagaaatccgagacctgcacctcagccagcagtgtgagctgctgaaaaagctactcatcaatgcccacgagcagcaaacccagcagctgaaactgtcccatgacagggaaagcaaggaaatgcgagcacaccaggctaagatttctatggaaaatagcaaagccatcagccaagataaatctatcaagaataaagcagaacgggaaaggcgagtcagggagttaaacagcagcaacactaaaaagtttctggaagaaagaaagagacttgccatgaagcagtccaaagaaatggatcagttgaaaaaagtccagcttgaacatctagaattcctagagaaacagaatgagcaggcgaaggagatgcagcagatggtgaaattggaagccgagatggaccgcagaccagcaacagtagtatgaaactccaaaatgcaaactgaagcagcaaacccacaaagcatcaaaagactcactcacaaacttctgaacacaaactccatggatgaaagctgtttattttgtttcctttatgtgtaaacaagatgatatctgaaaccagagagacttggaatgtctgactgacttctatttaacagcttgagtattgcatttccttggccaaacaaaaatagctacaaatccacaaaaatttactattccagtaaggcagagtccaaccattgataatacaacttaaacatgtttgctataaaataccatcacaagtaaatgagcttggtgtgaacaactctcctttgtgatgccttaggacatgtttgaactgcagcaaaaaacaaaaacaaaaaacagtgcattagcaatttcatagca

SEQ ID NO: 802 - protein, 1163 aa, Homo sapiens
MAKPYEFNWQKEVPSFLQEGTVFDRYEEESFVFEPNCLFKVDEFGFFLTWRSEGKEGQVLECSLINSIRSGAIPKDPKILAALEAVGKSENDLEGRIVCVCSGTDLVNISFTYMVAENPEVTKQWVEGLRSIIHNFRANNVSPMTCLKKQENIMNNNWNVCFFLFCPSITRTFASGKTEKVIFQALKELGLPSGKNDEIEPTAFSYEKFYELTQKICPRTDIEDLFKKINGDKTDYLTVDQLVSFLNEHQRDPRLNEILFPFYDAKRAMQIIEMYEPDEDLKKKGLISSDGFCRYLMSDENAPVFLDRLELYQEMDHPLAHYFISSSHNTYLTGRQFGGKSSVEMYRQVLLAGCRCVELDCWDGKGEDQEPIITHGKAMCTDILFKDVIQAIKETAFVTSEYPVILSFENHCSKYQQYKMSKYCEDLFGDLLLKQALESHPLEPGRALPSPNDLKRKILIKNKRLKPEVEKKQLEALRSMMEAGESDANIDDNEEEIESADQEEEAHPEFKFGNELSADDLGHKEAVANSVKKGLVTVEDEQAWMASYKYVGATTNIHPYLSTMINYAQPVKFQGFHVAEERNIHYNMSSFNESVGLGYLKTHAIEFVNYNKRQMSRIYPKGGRVDSSNYMPQIFWNAGCQMVSLNYQTPDLAMQLNQGKFEYNGSCGYLLKPDFMRRPDRTFDPFSETPVDGVIAATCSVQVISGQFLSDKKIGTYVEVDMYGLPTDTIRKEFRTRMVMNNQPVYNEESFVFRKVILPDLAVLRIAVYDDNNKLIGQRILPLDGLQAGYRHLRNEGNKPLSLPTIFCNIVLKTYVPDGFGDIVDALSDPKKFLSITEKRADQMRAMGIETSDIADVPSDTSKNDKKGKANTAKANVTPQSSSELRPTTTAASGVEAKKGIELIPQVRIEDLKQMKAYLKHLKKQQKELNSLKKKHAKEHSTMQKLHCTQVDKIVAQYDKEKSTHEKIKAMKKKGGSNCLEMKKETEIKIQTLTSDHKSKVKEIVAQHTKEWSEMINTHSAEEQEIRDLHLSQQCELLKKLLINAHEQQTQQLKLSHDRESKEMRAHQAKISMENSKAISQDKSIKNKAERERRVRELNSSNTKKFLEERKRLAMKQSKEMDQLKKVQLEHLEFLEKQNEQAKEMQQMVKLEAEMDRRPATVV

SEQ ID NO: 803 - DNA, 3716 bp, Homo sapiens
gtgtgtccctccagtgccgcttgccccttgttctcccaagcaccagggggacccctggtcttagattcaagttgcatcactagactaaccagctctgggaaccagagggacactggaggaactagtttgggaaatgaaaaacatctgcaatgagaggtaattttattctcctcttccttttaccctagtctcactctccatagtaggacctggatctttgcatcagagaaaacataatgaacaataactggaatgtgtgtttctttcttttctgccctagtattactagaacatttgcatcgggaaaaacagaaaaggtgatctttcaagcactcaaggagttaggtcttcccagtggaaagaatgatgaaattgagcccacagcattttcttatgaaaagttctatgaactgacacaaaagatttgtcctcggacagatatagaagatcttttcaaaaaaatcaatggagacaaaactgattatttaacggtagaccaattagtgagctttctaaatgaacatcaacgagatcctcgattgaatgaaattttatttccattttatgatgccaaaagggcaatgcagatcattgagatgtatgaacctgatgaagatttgaagaaaaaaggccttatatcaagtgatgggttttgcagatatctgatgtcagatgaaaacgccccagtcttcctagatcgtttagaactttaccaagaaatggaccatcctctggctcactacttcatcagttcttcccataacacttatctcactggcagacagttcggcgggaagtcttcggtagaaatgtacagacaggttctcctggctggttgcagatgtgttgaacttgactgctgggatggaaaaggtgaagaccaagaaccaataataactcatggaaaagcaatgtgtacagatatcctttttaaggatgtaattcaagccatcaaggaaactgcatttgtcacatcagaatatcctgtaattctctcctttgaaaatcactgcagcaaatatcaacagtacaagatgtccaaatattgcgaagatctatttggggatctcctgttgaaacaagcacttgaatcacatccacttgaaccaggcagggctttgccatcccccaatgacctcaaaagaaaaatactcataaaaaacaagcggctgaaacctgaagttgaaaaaaaacagctggaagctttgagaagcatgatggaagctggagaatctgcctccccagcaaacatcttagaggacgataatgaagaggagatcgaaagtgctgaccaagaggaggaagctcaccccgaattcaaatttggaaatgaactttctgctgatgacttgggtcacaaggaagctgttgcaaatagcgtcaagaagggcctggtcactgtagaagatgagcaggcgtggatggcatcttataaatatgtaggtgctaccactaatatccatccatatttgtccacaatgatcaactacgcccagcctgtaaagtttcaaggtttccatgtggcagaagaacgcaatattcattataacatgtcttcttttaatgaatcagtcggtcttggctacttgaagacacatgcaattgaatttgtcaattataacaaacggcaaatgagtcgcatttaccccaagggaggccgagtcgattccagtaattacatgcctcagattttctggaacgctggctgccagatggtttcactgaactatcaaaccccagatttagcgatgcaattgaatcagggaaaatttgagtataatggatcgtgcgggtaccttctcaaaccagatttcatgaggcggcctgatcgaacatttgaccccttctctgaaactcctgttgatggtgttattgcagccacttgctcagtgcaggttatatcaggtcaattcttatcagataagaaaattggcacctacgtagaggtggatatgtatgggttgcccactgacaccatacgtaaggaattccgaactcgcatggttatgaataatggactcaatccagtttacaatgaagagtcatttgtatttcggaaggtgatcctgccggacctggctgtcttgagaatagctgtgtatgatgataacaacaagctgattggccagaggatcctcccgcttgatggcctccaagccggatatcgacacatttcccttcgaaatgagggaaataaaccattatcactaccaacaattttctgcaatattgttcttaaaacatatgtgcctgatggatttggagatatcgtggatgctttatcagatccaaagaaatttctctcaattacagaaaagagagcagaccaaatgagagctatgggcattgaaactagtgacatagccgacgtgcccagtgacacttccaaaaatgacaagaaaggaaaggccaacaccgccaaagcaaatgtgacccctcagagtagctctgagctcagaccaaccaccacggctgccctggcctctggtgtggaagccaagaaaggtattgaacttatccctcaagtaaggatagaagacttaaagcagatgaaggcttacttgaagcatttaaagaaacagcagaaggagctaaattctttaaagaagaaacatgcaaaggaacacagtaccatgcagaagttacactgcacgcaagttgacaaaattgtggcacagtatgacaaagagaagtcgactcatgagaaaatcctagagaaggcaatgaagaagaaggggggaagtaattgtctcgaaatgaaaaaagaaacagaaatcaaaattcagacgctgacatcagatcacaaatctaaggtcaaagagattgtagcacagcacacaaaggaatggtcagaaatgatcaatacccacagtgctgaggagcaagaaatccgagacctgcacctcagccagcagtgtgagctgctgaaaaagctactcatcaatgcccacgagcagcaaacccagcagctgaaactgtcccatgacagggaaagcaaggaaatgcgagcacaccaggctaagatttctatggaaaatagcaaagccatcagccaagataaatctatcaagaataaagcagaacgggaaaggcgagtcagggagttaaacagcagcaacactaaaaagtttctggaagaaagaaagagacttgccatgaagcagtccaaagaaatggatcagttgaaaaaagtccagcttgaacatctagaattcctagagaaacagaatgagcaggcgaaggagatgcagcagatggtgaaattggaagccgagatggaccgcagaccagcaacagtagtatgaaactccaaaatgcaaactgaagcagcaaacccacaaagcatcaaaagactcactcacaaacttctgaacacaaactccatggatgaaagctgtttattttgtttcctttatgtgtaaacaagatgatatctgaaaccagagagacttggaatgtctgactgacttctatttaacagcttgagtattgcatttccttggccaaacaaaaatagctacaaatccacaaaaatttactattccagtaaggcagagtccaaccattgataatacaacttaaacatgtttgctataaaataccatcacaagtaaatgagcttggtgtgaacaactctcctttgtgatgccttaggacatgtttgaactgcagcaaaaaacaaaaacaaaaaacagtgcattagcaatttcatagca

SEQ ID NO: 804 - protein, 1010 aa, Homo sapiens
MNNNWNVCFFLFCPSITRTFASGKTEKVIFQALKELGLPSGKNDEIEPTAFSYEKFYELTQKICPRTDIEDLFKKINGDKTDYLTVDQLVSFLNEHQRDPRLNEILFPFYDAKRAMQIIEMYEPDEDLKKKGLISSDGFCRYLMSDENAPVFLDRLELYQEMDHPLAHYFISSSHNTYLTGRQFGGKSSVEMYRQVLLAGCRCVELDCWDGKGEDQEPIITHGKAMCTDILFKDVIQAIKETAFVTSEYPVILSFENHCSKYQQYKMSKYCEDLFGDLLLKQALESHPLEPGRALPSPNDLKRKILIKNKRLKPEVEKKQLEALRSMMEAGESDANIDDNEEEIESADQEEEAHPEFKFGNELSADDLGHKEAVANSVKKGLVTVEDEQAWMASYKYVGATTNIHPYLSTMINYAQPVKFQGFHVAEERNIHYNMSSFNESVGLGYLKTHAIEFVNYNKRQMSRIYPKGGRVDSSNYMPQIFWNAGCQMVSLNYQTPDLAMQLNQGKFEYNGSCGYLLKPDFMRRPDRTFDPFSETPVDGVIAATCSVQVISGQFLSDKKIGTYVEVDMYGLPTDTIRKEFRTRMVMNNQPVYNEESFVFRKVILPDLAVLRIAVYDDNNKLIGQRILPLDGLQAGYRHLRNEGNKPLSLPTIFCNIVLKTYVPDGFGDIVDALSDPKKFLSITEKRADQMRAMGIETSDIADVPSDTSKNDKKGKANTAKANVTPQSSSELRPTTTAASGVEAKKGIELIPQVRIEDLKQMKAYLKHLKKQQKELNSLKKKHAKEHSTMQKLHCTQVDKIVAQYDKEKSTHEKIKAMKKKGGSNCLEMKKETEIKIQTLTSDHKSKVKEIVAQHTKEWSEMINTHSAEEQEIRDLHLSQQCELLKKLLINAHEQQTQQLKLSHDRESKEMRAHQAKISMENSKAISQDKSIKNKAERERRVRELNSSNTKKFLEERKRLAMKQSKEMDQLKKVQLEHLEFLEKQNEQAKEMQQMVKLEAEMDRRPATVV

SEQ ID NO: 805 - DNA, 92219 bp, Mus musculus
  misc_feature (1)...(92219): n = A,T,C or G
actgaaaggcggctttgtgttgggcgctgtgtacacactaggcttgctcattcagtcctcgccacagccttggaagctaagagctgtgcttacctccctccatgttacagccaggaagcgggagcagagaccttgtgcaatttacccaagtttgcatagcaaataaacaggaacgctcacaggcaaatgagcctaaatgtcctgaacatgtctcctctcctgtatggtgacctgcatacattcagtgtgtgtgaatatgcgtgcggtgtgtgtgtatatatagtgtaaaggggttggggtgtgtgtgtgatgtatgtatggttgtggtgtggtgtggtatatgtatgtgtgtgtgtgagatgtatgtgcggtgtgtaatgtggtgtctctgtgtgtgtgtgtgtgtgtgtgtgatgtatgtgtggtgtgtgatgtggtatatgtgtatgtgtgtgtgtagtgtatgtgatatatgtggtatggtgtatgtagcacacagtaggtgttctataagtatttcttgaataagccagtgcagtgctagaggtcccggataagaggaaacaatgagagctgtgtgctgggactttgagggaaagagagaagaacaggtttcatgtacacacgccaaagacgtctgactctggggtctcagctcctcacagcctcccagacgaggaaagagctttgagacccagctccaaagcaccccagcatggaagggcttctctgttctcccctctaaccagaacagaaggcagggaggtgcaaggggtggtgtgggatgcacagcctgcccagccagctcacccaagctctgatgctcctgcttagacctccctggtctcagctgagcgtcttcctcggcctctttcccatcagtccttgcctgtccacttgtccacctggactccgaaggaggccagtaccccttggctattctggctgaagagtggacaattccctttttgcttggtccaactgaaacaaggatggaatttttccaaaggctctctattaggaaagtaacggaaaaacaaagccagaaataaaaactgcaaaaacaaagaaacagatggagcagtgggggtgagagtgctggccatgggagcgagtgggagctgggtcccgatggtaagacaatcctcaatacccagacacacacacacacacacgtatacacacatgcacacgcgcacacacacacacacacgcacacacgcacgcatgcgcacacacatttctacacgcactcacaacatctgccgttggccctcggatggcattttccacattgaactgtatatacagagcttgtttcaatctgccttcttattttgactgagcttctcaaggccactgccaattctaattattcctcctcttcctcctcttcctcctcctcctcttcttcctcctcctctgtgtgtgtgtgtgtgtgtgtgtgtgtgtgtgtgtgtgtgtgtgagggcagggagtgagtagaggaaatcagtcttttctctctggttaccccatggcctccatggtggacacttctgtttcctctgatctctgattctatctcgccctgaccacttccacccacacatgaaagtttcctatttcagaactcaaacatctgtcgctcaaaaatcaagccacaccgcttcctgggcaacctagcaagggcaggctctgtgctccaaagagggaaggtgctggagaccacatccagtgaaagagaaattgcaccccaaaggctaggaccttggagatcgagggcagaaagtaataatctatgttccttaagcatttttgccctgcacgcagagttagtgactgggtaaatgtgttcaggaaaccttctgtccaattagtggtcagtctgagatttactttctaggcattctgactccatttgtggacacaaaactggtgtctggggcatgacatgggtatggaggtgtgaccagctgccagccatggtgacagggaacaccaagaaggagaaccagccactctacattggcactgtgtgttggcacagaggaccctacctcttgatgttcttgggatgaaggggccaaccaaaacaaacataaaatgtatggtctgagtaggtggggctggtatgtcggggctagacagtaaggctttgggcagacctggttctcacagccagggggcactgtccctaacttcagttccattatttctataatgggagccatggccgcactgacctcactgtttcctggtcattgtcaggaagataagttatggtgagcgctgtggcacatgggcagtggggtaggcccagcgaacaggagaagagagtcctccacacaggaccctagccccgcatccctcacaccccctcctcagttacccactgtcttctttcctttctatttcctaaagcaatcttcttgaaagaaggtggcctgcttcagcctccagcttcctcaccacatgccctgttagtgtggaatgggggggggggggggggggaagggagattgttgtttccaggtttgacctgccatgaagatggcttccttagaggtcacaacagtcacctcagaggtgtctgaggtaaaaaaaaaaaaaaaaaaaaaaaaaaagaagtaaccagcctcatttccctttgtcaactggaacttggcttttagagttctttcttatgctcttataacagttcctctctcaactctaggtccttagcttgatctagctctctcaatctttctggcttctctacctcaccatcttctagaccagttgttctcaaccttcctaatgttgcaaccctttaatacaattcctcatgctgtggtgacccccaaccataaaattatgccccttgctacttcgcaactgtaaagtcgctagtgtcatgagacagaatgtaaatctccgatatgcaggatagctgatgtgtgacttccatgaaaaggtctttctagccacacaggggttatgacccacaggttgagagccgctggtctaggctcatctttggcttaagtattgaacacatttcttcctaagactcttgccatttgtcctccagattcccccaccttagtgacctctgcctccatggtcatctctatgcaggtgacttccacagcccatgctccctgcggaggtccagtcctgtctcatctattcaagaagcccctcctgcagcctgaccacacacaacacctcagcctcacaacccaccgcagggatgtgatagcttgtttcccaacttcataacagtcagagctgcgcaacacccccactccacaagtctttcctcccctgccctggcaagcaaccagctacggagtcctgaatgctcacctctgctgttcccccccacctcctctcctgccacaccctctccctgatagctcctatctcttccttccagccccacacctcacacccatgcgcttgcgtgcgcacacaccccccccccttcaatcaaaggagtcttacccagggtacaatttgaatgagatgatttctttcttcagaaactttaaatgtctccatattgtttatagcaatatttctcaaactttctcggtggtaaaaatacagactcccactccccacccccgccctcatgaatcagaatctttgagcctggccccactgttctgtatttttaacacgtatccaggtgacttttagcatcacaggtttttattttccttcttcttctttttttttttttaacagaatgctggcatttaggataacacttagtctgacattcgaggctctctgtatccacttcccagattgacttcacattctcctctatactctggatgctactgcagcccctgatgtcccgaacctacagggttccgtctcacggagccagatctctcctatctatcaagactcaattaaaaggccacctcctccgtgaagaccttcttgattcttccggctgagcatcatctctctcatcttggagctgatatcaccttctagtctaaccatgtgcaatcagcaggcattagcgcctagctcacagagcgctgttgttctctttccctcccctttatcatctgtgctctttcttgttaccattgcagcccctagagccaaatagactaggtctgagtcccagatcccccacttgattgggtgcctcagtttccctatctgtaaagcagagttggtacgagaactaaattaacatgcgtcgtctttagtttcggagtctggaggatccaatgtcagggtacggacagatgccacgtctagtgggaaccttggggtaaggtccaggcctggcacctaaacttaaagctaggatgagaatccttcacttagccagtcagtggagaagttgcaggaagattaaggaaatggagaaatctcaaaggctcagtacccactctggggaagtagggtcaaagaatggggtggaggggtttggaggctggggtgcgaagcaaaaggactgtaagtgtgggaaccgtgactcggggttatggtggtctttccagtactggcccagaatggggcatacagtaaggtctcaacaagtacagactgaatgtctcagtggctcgatagcatcacaaggagcacacactgctgattacgccatattcctctagggataagatcctggactctaagagaaactgaggcaaagaggaggtcaacctccctagaactctggaagtgcgttacataggacagaggccatggctcggcgtgccagatgtttacagggcgccctgtccttgttgggcatacagaatgccaaaggggacaagcagaaaaacggaactcgatgctggctgaggaggaagggcatggtaagggaagaaggaggcaggcaggaaggaggaggctaggggccaggccaggctgccccttgataggaggaatgggagggtggggaagctctgggccagcggctgggtcagatcctcagccaaagcaaacctacctcagggggctgggggaccattccttccccacacagatggaatcaaaggcaaacaggaaccctgcagggcccagctgtgacccctgcccccaaactcagcaagccccattaaccctctcctccctgacacctcatatcgccacagtccaaaagatctccaaagacaggctcacctgttatatgttccctgaataccacccaagagatgccaggatccctagtccaaaaggatacccagaccctgcccacctccatggtggctctgtgtaaaatatagaggtcatctttgctaataaaacaaaaccaaaaccaaacaggccttcctttgtttctatgccaagagctaaagggttcagactcatttcctatactcacattaattgaaatagacacacctgtacctactaacaaggctgggcaggaacaactgcccccttgtctcctctcagcccaggggaactgcaggctactgctcccctgagctaggcatgagtaagaggaagtagcccagagtttggggagcgccagaggtgaaaggagatctcacaggctttctggcaccccttgtcacccgggagacaaaataggtgacagcctgcccaaggtcatccaagtggccagtagcaccactgggacctgacttttaggcaagtgtgcaccgcaccagtccatgactcaggccccaggaaaggcaggtgcaccactgagcccaagacagcagacacaaaaatcttttctttttcaatatccttaacaccccgacctgtgtgtcccattggatgggaatccaatgcagacctttctggatccagagaagcaaggaaagcaaagagataatgggttaggatgcaggagaccaggaggccgcttctcagtgcctttatctttctcttttcccaattctaaacaatgtattttgaataatcaaaaaaaggacaagaacaccatgggggaggggattaaagatggcggacggcaggagagtccaaggaaaagaacttttagaagctacaccaagtacactgaaaagagagacccacgaggaagccaggagaaccaatatcagggaaaagagaagaaaacccacacagtccctgtacttcagtggggaaactgaggtagtagcaggcctgggacagctacatctgtgacctggagccaggccactacagtctgagggaatgtgagcggagagctaggaagaaaggagacattaattaaggccatcctgggccttctagtctcccaactaatttttcaccccatggtggtctttctttgaaagaaaagaaaaaaaatgtcacccacactccagaaggctccagaagtctggcagttgagacaagactacattagaaaggaagatgagaggttcagggaccaggagagacaggacagcccagggggctggcagcaggagaggcaagcaagagggatggaggagaagaggagtggggtgagggggcgggggcaggagaggaacaggggtggaggtgggggtgggggtggggagtgatggagtctctcccagctcttccttcccaccctctgtccctcccattctctctttcatgatcttgaaacaaccttcaagtctgggctggaggccccaggaggccagtcacttaggaaacaaaactgtttcgtttacaagtccatctgcagctgagcgcccaccctccctcccccttacacactctcccatggactctcacgtacacccacagtaatgcacagctttccctgtagcccgcgtgaatgcctgcacacggacacgtgcacaccacacgctcctaggcggactactaattcgtaataaatggggtgcacacatctgagcaagcgctgccctgtccccatcattttaaaggaggaggaggcaggctctctcatcttgtctgagccggcttctcagacttgctatgtagcttggggtgaccttgacattctgatcctcctgcctctacctcccaggcattggggttgttctacaaccctcaccttagggatatttgggatagaacccaggtttccatgcttcctaggaagtcacccaactgaaccacttgcccagactgaagctccttcggagttagtacttggtacattcctacccacagaatcccagacacgagtgtccccttcggtcctaactagcatcccacctccacactagtacatgttcctatgtctctcagctccctaccctgtgtatacacatcctacttcccagatctctgccgaccaaaggcttgggccttttccattttgtcccttgtgaccttgtcctactctgagttttctctcaagaccactcccgccatccgtccccacctcttgttctcaggtctttctggttttcctcctttgttcctctcttgactcaaataagtccccctgtctggatccccagttagagattaaagggccagatgtctacctccactgtgatctggggtctgagacagactcccataggtccgtgaagggagtggtcaggaaggcgtgggtgagaagcaggctgtaggtgctctgcctgctgtcacttgttgcctctcgagtacacagcacagcacagtgtccttggggctctggtcactcaaatgcaggacatggcagggagccctagcaggctttgcaagcagaggaagggcacagccctttccgttactgagacagcagaaccaggctgtgggaaggcctgggcagtactggaaggtgccagcaggggtgggaggaggttgggagagcacacagacgctcagagcctttctcttcagccttaccttatatcttgaagaggctagggcgattactcaggaactctggctcaggcctatagatgctactcataccccccataaggatcatctattcacccctaaaccccacactccactagccttcaggtaaatcttctagagccttcgtccccagctttacatcttcagctgttctctgtgtccttgacacacagggactgtgtttaatttcctctcatgattttcccagtctcatctactccagacccagaccgtgagaatggaccacagaccatgagaaagtccatgtgtgcttatagggcccatccttcctgcctaggcccaggaggaaacagttaggggcaggtaggcgctgaccctccgatgtctgtaatggaaaaatctcagctgcagagccggaggtggccagctatttagggaattcagatgtgagccctgtgctctgagagtagatttcctggacaagaggtccataatcgctctacagggagctccctccagggccagagggggctcaacccagccagcccagccagcgggcaccttaggactcctgccaatgcctcattgcctccctcctccttcccagccagggttctcagacctgcccctgctcagtgggcgtccactcactcactacatttcggtgcccagagaaatggggacactgcagaactttatccctctaactgttcctagtcggtgggggcagaaaatcttcttctctctgtccccagcctccattcttcaacaaatgaatgatgccaacacccccccccgcccccagagcggctgggctggtcatgagttatctgctctgttcctgtttctattgagagtaatgttgaagacatcttctcagctggaggtgaagccccctccctccccccagacccaacctccaggatctcccatgccattaaacaggtctctcacagtggagtctgcctgaccccttcctcccggaaggaaccaaggaagtccttgctctttctagtcccacagagttggtatttgaggtgataatgacttccatgccctcctgctacaccttccagatttgacttctcataccattcaccgacctccaacctccgactcagactcactcgaagctcccctgtagcagtgaaggggaggatcatctgcttcacacacagaatggcagagatgcttccaggtgcctgctgtgcccggacttgggcggccttcctggctctttcatatcttctgtccttcaccttcccaactgcttctaagtgcggagactcttgcttgtcttgaacactgggttacaggtgtgtacaccattaaaaatcatgtcacaatgttgcaaccaacaacattcatgtcatctacaaaccacactggacaactatgaaatcacattatcgagagagaaagagagagagagagagagagagagagagagagagagaaacacactggttggtggtggcacattctcttaatcccaacagaggcagggggatctctgaatttaaggattagccagatctgtagagcgatttccagaacagccaaagcaacacagagaaaacttgtgtcaaaaaaaaaaaaccaaataaacaaacaaacaattgctacactgttacaaagtatttcagtgtttgaagtaaggttaggatgtattgggccaaattcctagctatggtggtggtggggtggcgtatggagcccaagagcaacaagtgggacatgcctggtgcagcatctccaggctttggttctgcaaggagcttcaaaagcaagagtcgtctgattctagttctaattctttcttggtcacaacgtccttgcagccccttacagcagatggagcaggctgttgctttctctggaaacttggatgtgagctcagggagattctgtcttatccagtaagattgctgaattcttatagccttgcttccccacctggaaatataggcaattagtcccaggaccatgagctggctgctctcgaggggccacctctcctttttccagctaccccttccccattcctttccccttgcttctctcttggttgtagctgcccatgggatggggaaatgctaagaggagctgagggggacagaccggggacaaaacaggaccatcagctgggccagttgctaaagaggcgggaggggaggggaggagtcctcagggatccagtttcaacaaacgtttctttccccagaaggggaaggcgggagtgagggggagagggacctatttaaagctaccctgttgctcagactgtctctgtctgtctgccagggtctccagctgccccagacaggcggtgtggtcttgggatcctcctggtgacctttccagcctaggtcccctcagccactctgccccaagatgggtcgtggggtgagtatccctccaagatcaggggccactctctggagggtggagtagaaatgggacgtggagagagggtgagagacgctgacggactgcgtgggatggtttgaacttggaactagtctcccgactgcacatgcatgtggattcgttccacagagctcatgagcctagggattggcaggttctgcagctaccctgctctctgcctctcccacaactagcctaagaaactacccaagtgcccttctagatctccctgctctctgcccactcatccttactccacaaatccctcctctcgctccacaatccctagcttcccagctgaagagatctttgacactgttagttctctgccgtccttgttacccactgaaaatatctattgctctgaggtccttagcccaagagtacaggggccagcctggggtgttgtggagcaaccccattcccagagccacctagcagttgattacaccagttctcagggttcttcatgccagagtcagctggggcagagagagcaaagatgtatccccagccctcaccccagcacccctccggatgtccccataagcactgtcctgggctccaggccataggctttggggacctttccaaaggctgctgagaactgtgcctgcctatggcattgtgaagcaatggatttgccagtgaaaagattaacagccatatctgggcgagcaaggacaaggcttccaattcttgggaataaaatccccatatgaagaaaaaggacccaatccctttccatactgtgcttggaagttttcctcatgtggaatcctggcaaaagagggcacagagggaaagggcttgacaggccattgcaaaatgcgagggggacagtgccacagggtgctgtgagccaatttctggatccaaggaggagtcaggcaaggacatgttattgcactaagctgaacagctggaaaaactcgaatcctggacaccagagatccagagcttgggtgggaactggaaatagaagaccatcgcgcatgtgtgcatacatgcatctgtgtgtgtgtgtgtgtgtgtgtgtgtgtgtgtgtgtgtgtgtacacgtgtccacaaccttacaatagcgtgttcctaggatagtgctgcaggcttccatgggtgaacctgcactatgtttcagcaggagaatttgcaaatgaagggcctctgggcatacagggtgatgggtggtgagtgtaaggtgagggctgtaagcccgcccttaggaactatctatgggcaatgggtttccccaaggaagagtcatggttaaactgggaccttcagtaatatcgttcctgctccccatagaaagagcagatccagctgaggggcagaacctctgagagtccagggccaaccaggtcaggcaagcccaacctccatctaagtagaaagaaagagcagacactcctccactctgctctaccccagagtaaggtagccccagctcatagagttcttttgactttgaaagtaacttgaccttggcttccccattcagaacttctcccctagtacccttgctgggtccataacctgtggcacccctaacctagtggctgcgcgtgactctgctggtctggtctgtttagcggaaaaagctgggttaagtctgggagctcagagtcctacctacaaggaaagccctgcagaaaacaatcccactccccacactcaactctggggtctgcttcacctccattccagtccacgcctgtgtggctgtgaagggcagtgtgggagctggggagagggatcacactggtgggagggagccaagcctcctccagaggctgaggtgggggtggggggagcgttggctgctttccagctacccccactttgtcccagtctctggctttctgaaaaaagaactctctgttctcctacaacattgaagaaccaaagagagggacttgtgttaggggagggaggggagaccagagggggagagaggggtccccacttcctctttctttcttccctgggcagccactggccccaaatctctgcaggctcctggccatggagcctgagattcttgccaggacagaagaagggggaagggcagccgagctctgcacttatgggagagcagggtgggagctgggaagaaaaagcgccacatggagttatttagctcagccacaatccaacacttaagagccagtgcatttctcagagacacctatctgtttgtttgtgacaggatctcgctatgtagcccaggctggactcaaacttccaatcttcttgcctccacctcccaaattatgggcatacagatatgcacaccaccagtcccagctccataagtaggcatttgattctcattttcatgtctgttgtttgatatcaaatgtgcagagattttcctggactctgctgctcggacctctagcccaagcctcccacccctcaagcccccaagggccacactgacgtctgtccagatgctttctcgaattcaatcctactgtggcctcctagcctccactcagccctgcctcaccaagcatgctagaggacagaacacttcaattcacccgacttaatgaagcctcttgcatcgcccggggaagggagaggtagaaacatttctgagttgttcttagcgcctttggatgaccacctcagtttccccgtgatgcttggcctctagacgctcagaaccagattgcattcgtgggtagttcagatacagatgaaagcatgacgggtcagtttccttttctaaacggagtatgtctgagcaacagtctcggagagcacatcttctaggtcattgcatcctgaaacaagtgcccaccttgtagtgtacctcccacgcccagcattgcttctgatttcgctggacagaattctattatccaaggcgctaagcttacgattccttaggatcacagcagctgcagtatcccccagacggctgactccgataggagaaaatacattattctcagtacccaggactcagaggaccacagccacgtgctggtggaatggcaggatactgctctgcatttgcccggatccatagaacatgcactcactacaagagtgtcagccccggccggccacggggagatgctgatgaaacaatgcgccactctaacgatgtgggatgctgatgaggagggaggctgtctatgagtagaagattcacgagaactttctctcctttccactcacctttgtggtcagccaaaaagctgcttaaaaaaacacctgactaaaatacataataagcccccccccaaatacataatcttgaaaaacaaaataaacaagcagcctccccttacactgatgcgcctgtctaccaggtattcattcgttctttatgcaaaacacaaatcataaccacagcatcaaaaaaacgactcctgaaagctcagtgtagccttgagggtccatagaagagcaggaggagccaggcataaacagctaccccttgtatcctgagggaagtggagagacacggagggagagacagacacggaggaagatgacagcattttgcacacgatcaataaccccaggtccttcctagcccaccccacccccccagtcccttgctccaaggctgcctccattagaatgaagaatcctcaccatctgcccaaagaagtctgcagtggccctgaagagaagggcagacaggggccccaaaagatcactattaaaaaacatggcgctgatctggacagatggcccaagactgaccctgacttccatggtttcagatctctatttactctcatatatatttcttgctttggagtttcaagtcctgtgagttgcctgtgtccagtcccaggcacgcctgcccaagcaggctggggagggttcccagcatgccctgggctcccattttatagctgtacttgaacccatcccttctagcttctctcagcccatcatctctacccatgccatttccaccatccagtctgcttctccccttccctcctgggacttctactctatccagtgctcctctctaaattaggcagacattcctatggggtaccctacccatcgacgcaatccctgcccgcccccaaagtcccttccgataatataggatgatccttttcaagacgtgttctgattctaatggcaggacatcctcagtgtctggtgtgaacaggctccatccagtctccctgatgatctgagccatcccttcctttttcaggcagggcgtgagtactcgcctgctgccaccactgcggaaaatgggggtggcaagaagaaacagaaagagaaggagctcgatgagctgaagaaggaggttgccatggtaaggaccacagagctttcaggggggggggctgtggagcagcagctctgctcgggcactcacacaccagcagccatgagcacccagacgagctttgtacccaggcccatgctccccacttaacccagtgccccgaagtgtgcctagcctcctttcccaaagtgtctccatttccccttccccaggatgaccacaagctgtccttggatgagctgggccgaaaataccaagtggatctgtctaaggtgagtggagccatgaggtgagagaggcaggaagcttcaggaacgagagccccaaaactagaacacaacgctccttgcaagtgagggaagcagcccagagatgaaagacttacatatggtcatgggattagttggtggcaaggccagaagtagactttggacccctgcttctccctctttccctgtgtatctagaattccttgaaaccctgggcccagaccttggcaaggctctgtgctcctcctcacacaactgcttttagagatgacaggcatggaccagcaaggtgactcatccctgttgttatagtacttgccggcccctgctacatcagtggctctgtaataagatgcagtgcagacatttctttaatcctcaccatagctgggtcaggcattgtcagcctgtttattaaagcaaggagactcagaaagggagactgacttgctggatctgtatccgggcccatgccccccacttaaccctgtgcttccaagcgtactcagcttcctttcccaaagtgtctccattgccccttccctgggatggccagaagctgtccccggatgagttgaattacataaacaaatacaggcagattgctgaactcccattaaaatatattttaaattgttcctcaaagctaggtggtctgtcacactcctattgccccagatagatacttggggaataaggcagaaaagattgcacgttcaaggctggggtggacaatgtagagttcctgtcacaaaatcaaatcgaagagggctatggatgtagttcagtggtagagtgctgtgtagcttgtgtgatgccctaaattcaatccttagttttaaaaaaaaaccttccaagcgctactgtggtcaactgtagtcttaggtacttaggaggctagaacagagagaatgcttgagcccaagagctgaagaccatggtagacaaactattgctatcttggctcaaacaaataaaaacattgttgaagctagccacaagtccaaggccagcttgggcttataaagtaacttccaagctagaacaatcccgtctcaaaagaaagatacaaaatgttgtggtcagtatccctgacccactcctttctgtctcttcttaaactgctaagctcccattctttaaccttactttattttctagcaggagctttccactctctggcatcattgtatatttattattatggtttcttctttagattgtgggtgggtactttgttgatcttgcccatctctccatccttcccagtgccgggcttgcagttggagctcaaggttcacacataaagtgggtgaacacagaacataaagatcagtaacaagtggttcctgctcaaaggcagtaacaaaaatttcaaaaacaaaaaccacacaaacagaaggccagtgtaatatagtgagccccactctagttcaagcatgggggattgggggattacctggatccagaaagaggcctttgatctagcctggctggcgagatcaaagagaagtgagcctggctaggctttctttggaaagtaataggtgattgccaaaactgcgtgacacccagggtcaaagctgtggggctttccctggagccctggagaaaggcaggatctacaggaagaacggagggtggtcagacaaggaatttttccggacaagaaatcatgcttatgcatgctgtcccaacaaaaacatctttcgacccaagaataacccaggtggagccacagtgagtccatattagccttcaagacccaagtctcattatagacaccagttcctctgtgtggtccctcatgatggtcccaccccttccaaccaaaggagaattttctcccttagctgaacatgattctctaagatgccgagagatgtggtgagggttgggtttgttccctgtgccacacccacacttttcttcactccccagggcctcaccaatcagcgagctcaggacattctggctagagatggacccaacgcccttactccgccccccacaactcctgagtgggtcaagttctgtcgtcagctttttgggggcttctctatcctgctgtggattggggcactcctctgcttcttagcctatggtatcctggccgctatggaggacgaaccatccaacgataatgtgagccatgcacctgacccctggacctgcttatagccctgccctccaactcacaacctcaaataaggtgatgggagggctcagggaacaagatcacagacccagtcaggagctcagactgatgagaagtgaggcttctatacatacctgtgacgcaccctccagcacatgtgggcagtgatacatactacatactccttccactaataggctgtctgtatccctgcgtcttcactcctagaaaagccaaagccatggggattcccttctttgccccttccatgctaggagcgtggttaggagactggggaaggttgtggagaaagactactcagtgtcattctcaagattgagtcaggtgaaggatggggatcccacatagagtgactctgggtgctcatcccaggtgtcacccagctctggaggtgacaaatgacaggtccctcacacactctctctccttaccagttatatctaggtatcgtgctagcggctgtagttatcgtcaccggctgcttctcctactaccaggaagccaagagctccaagatcatggactccttcaagaacatggtgcctcaggtagatgtcagggactggctgcacccaagtcggggcataaggtatctgagacggtccgcctctttctgtcttgtggtctgaggtggaaggaagatgggcagaaaagaaacctgtgggctctccacatcagatcgcagttttgccgctaacggtgtagggggttcttcttggagagcaaaggtacaaatgaacaactcatgacgggctcctggcctttccgcagcaagctctggtcatccgagaaggagaaaagatgcagatcaatgcagaggaggtggtggtgggagacctggtggaggtgaagggtggagaccgtgtccctgctgacctccggatcatctcttcccacggttgcaaggtgaggaggtcaccgatgaatctgtacagttaagagaggcccacatgaaagcttaaaagttaaaaaaaaatgcaaacattaaggtctcccctgtacctggtatacctccttctagcatatgatggctacatgctacctctgtggatctatctgttaggaatgctctgtgccctgggatttctttgatctagtcattttatagccactgtatattaaatactatttccatgatagaagtctttacatacaccatctaatttcactctgaaagattccaggccagcctgggctacagggatccctgcctactaaattaaagtttaaggaaagaaagatgaagaagctgggtgtggtgggtcacacctataatcttaacctccccacaggcggagggtggaagcaggaagacggagagagttcaaggtccacccatcctgcctacctagagagggtgtctggaaaaagatgatgtaattatctgtcacagcctgataaccctgggaggtagcatttttatagacagtcttggtggtgtctctggagttgtgcaacacaatgaccctgctaacattcccactttacaggtgaacaaacaaaggccgtgtgggttacataaataacccaaagacataaaaaagtcaggaagactcagtcatacaaaccaaagccagggtgatagctgagtaaggccataaatatgtgatgagggcaagtgtaattttgtccttcttgtcatgaagattgaggggggttgaatctggctcaggagacagctgtgtgcccacagagctgctgctgctgccagtttaatgatggctccccttcctcctcaggtggataactcatccctaacaggggagtcggagccccagacccgttctcctgagttcacccacgagaaccccttggagacgcgcaatatctgtttcttctctaccaactgcgtggaaggtgagacgctagcctcccaagaaagctcctcaccccagcacagtgcagggaaggggctgactcctgaaactatacttatttggctaaagctccgcatataaagggcattgagggaactgaacattgcggtagtagtcatctctggagaacagggccaagggcagacagactctgctggaaatcacctctctacaggaagctctcagttctgttgatccccaggctgaaagccttccacaaaacactcagatggtgagtcaggatgccccctcccccaactgttaggagtatggaagtcaagtgaggtcttctagagggtggttctggaccaggcagtgagctgagtcaggactgactctgggaagacatccaggggcaagagatggtaggagagagcagtgtgcaaggaccatagacctctcacaaggtgatatcgaataccttcctgcatccttgcttcacgactttccttctcctccatgcattggttctttgggcttgtttccttccttcagagaattggaattacaataaaaatcactacacattaaatttcctaaatgtttaatgtattgggattctgatttgccatagcgttcccacaactgaatgcatttgaaaggtcagataaggtatgcctactgcttatgcatcgactggctctgaagcgaggtcaggaaaagaatgcaagtcatattcgttgcatgcttgctctgtgacagatggacagtcatagtccatttaaccactgacttcctaggtaggagctctaatgtcatttgaacctagatttggctgacttcaacatgaatgcccttcccagagtaccacacattctttcccaaagacccctgcaatgtcacatattttagataatcacaatcttattttacagattataaatatatagaatgaatatatagataaaaatatgtagaataaaagattattttattctacattgagaagatcttgtttttttaattaaaaaatatttcataattgtctgtgtgtgaatgtgtgtgtgcgcgtgtgtgtgtgtgtgtgtgtgtaagtgagcacactcataccacagtgcacatgtggaggaggacctgcagaccttgcttctctgtctaccacgtgggttctaggaatccaactcaggtcaacaggattggcaggtaggagcccttacacactgaaccatcttgctggctcaagaaaatcttaagactaaaccaaccagccaacaaaaaccaataagtaatttactccagtttatcataggcttttgaaaaatatctactataagattgatttgctgaaatgtcgcgatcaatttttatttcatttattgaacctcttcaatttgaacttctgtagtacttgccagatgtcttctcaggcccaaatgtaaaagaaaataatttgctattgtattaaatctaagattggtggtgtatgcagggaggggaagccctgtgtactaaaagtggcctgaaggatctgagtcttcagcttatgcactttgtgatggttttatctccttagaaaatatgatgagggggctgaagcgatggctcagtggttaagagcactgactgctcttccagaggtcctgaattcaattcccagcaaccacatagtggctcacaaccatctgtaataggatctgatgccctcttctagtgtgtctgaagacagagacagtctactcatgcataaaataaataaataaatctttttttaagcattaaaaaaatatatgatgagatgtcagtcattggcaaacccagggaatttaccctctgttttttccttcatggcaggcactgccaggggcattgtgattgccacaggtgaccggacagtgatgggccgcatagccactcttgcctctggcctagaggtgggacagacacccatagccatggagatcgagcatttcatccagctgatcacaggggtggctgtgttcctgggggtctccttcttcgttctgtccctcatcctgggctacagctggctggaggcagtcatcttcctcatcggcatcatcgtagccaatgtgcccgaagggttgttggccaccgtgactgtgagtggttgaggctgaatcgccaccagggccttcttcctgtttgacacagaccgttgcttactgcttctcagcagtgttcttcccttcaggtccctgcagtcacatagcagatgccgtatgcagaaattgttcagggcatgcctgggagtttgaagttgaaaattttgggggttgagctgtatctgagcattcaatttctccttggggacttgttgtggccgtgttcctcaccatctgtgtggttgtcgcccgactcagtctggggttcatcctgtctcgtgtgctataaagactctttcaaaggtcaccagtgactaactagcaaatccattgacatttctcagctctcatccttaatgctgctgctgctgaaatgaatacttctgtccatccccctgtccttcatcagccactgtgatgtgtcactatcctggttctcctgtcctcacagcagctcagtgactgtcaagccctagccccagcttttctccttgctgccctcagaggaacccattttcatccatagtttctgttgtccctttcatgtgggtggttgccacatctttgtacctgctctggagtcagatatcatgaactttcttccgggcgtttaccacagatacggcctaagaacctatttaagatgcctaaagttgaactgtcgctatttcctgctaggtcccacccagtcttttgtgagtgggattaatagaaaaggattagagcttccgaatgggaaagaatcatagacacctgtcactctcgacttggcccttttaattctcctctctgtctgccaggtgtgcctgacgctgacagccaagcgcatggctcgcaaaaactgcctggtgaagaacctggaggccgtggagacgctgggctccacgtccaccatctgctcagacaagacgggcaccctcacccagaaccgcatgacagtggctcacatgtggtttgacaaccagatccatgaggctgacaccacagaggaccagtctggtgatttgggtgctccggaaagggtgacgggaaatggatcctgccgagggaccacgcagaagagggatcctggggtatgaaatgctctaagggagagccaagcttctccctcctttcttcccaggggccacttttgacaaacggtcccccacatggacagccctgtctcggatcgctggtctctgcaatcgtgctgtcttcaaggctggacaagagaacatctccgtgtctaaggtagggggccagccagtgagtgcagacacagatgtattggggggctccttgcagacacccagctttccctctctcaccctgtagctgctttggtgacctcggctgatgctctgtctccatcctccatctcctcccttcccccaccgtgacactgaattctcttttcttctggcagcgggacacagctggagatgcttctgagtcagctctgctcaagtgcattgagctgtcctgtggctcagtgaggaagatgagggacaggaaccctaaggtggcagaaatccccttcaactccaccaacaaatatcaggtctggctggattgcgggggacacagagagaaaaaagagggacacgaatggggagagtgggtgaacagagactcagtagaagaaaggatgggttacatctgagaaacatctgttcccaggtcaatcccgggacaactggcctggctgcatcaccctcgaacaggcaaaccttaccacacacagcttatcccattctctcctcttctgatagactccccatcctctggcaatggtcccccaacactgccatccgaataactaacgcacacttccatagttcccatactgtatccctcagccttaggatacctgttcctgccaagaatagcctcgggtctattctgcatgcaccatggagggaaaatccccagggcattgaggactaggagatgctaatgaaagccatccagcccctacctagcacaacacctatcccgactgatcttaatacctatttgttgaacaagtcactgttctatgaaagcgactccatagaactccatgggttttaagactcaggattataagcaaacaccctccacacatagtttctcctttgttgacagtctttgatggataagatttaagttgttaaggaaggttttccttctaaacagctgctatcagaccctgagctaagcaacagagccaccaagattctatggctccctctgtaaccgcctttcccttcccagctctccatccacgagagggaagacagtccccagagccatgtgctggtgatgaaaggcgccccagagcgcatcctggaccgatgctccaccatcctggtacagggcaaggagatccctcttgacaaggagatgcaagatgcttttcaaaacgcctacatggagctgggaggacttggggaacgagtgctgggtgaggaggcagaaagaggagcaaggctgagaaggtggggccttggtagtgtctactctgcggctcttactcctcccgcttgctcctcctcaggcttctgtcagctgaacctgccttctggaaagtttcctcggggcttcaaatttgatacagatgagctgaactttcccacagagaagctctgttttgtggggctcatgtctatgattgatccccccagagcagccgtgccggatgccgtgggcaagtgccgaagcgcgggcatcaaggtactggcctccttcctacccaccccacccgtatccttgtatgcctggtgccagaggtcaggggactgcagcagctgctgtcctgaggtgacgcaggctcctggtggcctccttcccactgacctagaggtgttatccatctgtagggaaaggcgcatgcctgacaagatcgctcccttctgcctttcgcttaagcctattatctagcccagctcactgccccgtctgcatgtgccgtgcccccttaccatctcagtctcattcaaagcaccagtcggcactcctggcatggagacctagttatttgattgtcccactgatgctcagtctatccatttggaaaaggactagtaagctcttgactaccccaatgggctcctcttatcactccatattctcctctctcatccatgatcctctccccacccccccactgaattcttgtccaagtgcggccggtcatttctcactgactactctcttttatttgtttggtttgttcttcatccagaaaatatttattgcttatcagaatgcatcgggcacttggtccctgacatcttctttttccagtcaccaattctggtgccatcactgtcacgatttttaaaaaaaaaaaaaacaatgcaactcagcctgtcccctgaaagccaagtctttgtatcccactgaggatacaaagatgcatagaaactgagctacatctcaagatctctctggattggggggtagaggggaagatgcttctaaacacatcacagaacagtcacaagagttgggggtcactgaggacctactggtcagatgccctaataataagttattttaatttcttatactcatcagacactactctaagcactgtgcatggctgccttctgagtaagtgccagcatctccctgttacatagacagagaaaccgaggcacagagtagcaaggccaagaccacagagctagtaagttgctaagtcagaatttgaaaccaggcagtctgtttcttaaccatcacaccagaagactgggtgctatgcatgtgcgtgtgttttgaccacaataagaactcagtatggaaaataggcattattaacccccactggaaaacaaacacagggaaactcagagtaggtaaatagcttccccaaaatagaaatgtagtaagaggtcagctgggaatgggaagcccagttggcttgtctgggagtcatggtccttctgcccagtcaggtgcctctcggcatgatgagaaatggcacagcggctgggcaagggctctgtggaaaaccagcggggaactgttaattccacctcagagaactagacagggtttagcagaggggatgatatttgacctgggccttaaaggctgatgaggattcagtaggctctaaaggaaggggagccgtagcaagaacaatccgtacccagatgtgcctagactatcaggaggtatgagggtcagcagaggagagatggggactactgggaattaggactgagacattgggtcagggccagttggaaggatttcctttaaatgccagacttgtgtgccatggaaggccacagatgtcacagggaaagctttaaggctacctaatgggggatggactggatgtgggcaagagctgaagtcagggaaccaaggagacagattaagacagattaaaggtgcacaatagcccaggccaggacgaggatcccaatgggacagcaacacagggaacggagacacatagttgcccaatgggacagcaacacagggaacggagacacatagttgcccaatgggacagcaacacagggaacggagacacatagttgcccaatgggacagcaacacagggaacggagacacatagttgcatttgagaagcagtttgagaactcggtgagcaagctgggcgtggggtacaaagatatgggagagaacaggacagaatggtcagaacagatggtatctaagagagggagaggagctgcagggtgctgggaggactgatgggatttcagcctggaccgtaagtttgaagcatttataaggggctggggggatgaacatctagagacggttggagtatagagttcaaggtcaggactggagatttaaatatctcattagcacatgagtataaactaaaggtttattagagcattttatgacacaaaaagcaaacaggagtcaaggaaaaagtacagaatgagaccctaggttcaccaacatttctgaggaaggggaggaagagaagtgaggaagatggatggtaggacacagctaacatttcttgtctacataaagccagcctgggatggtgtggattacccttcccgcgccccccacccccacccctggccccactgtgctgaaacagaaaaaggacttgtctaagttccaacagctggtaaatgttcccatccaaagccaggacttgctccattctgccaccccgaggaagcttgaacgagcatgcagtggagtaagggtacaagttgggcagagatgaaggcggtgcagaaaccaagcgagtgaagggtttccatacattagagagtcaaggacagcaaggtttgatgagactcttgtttttcagtaggaaggaactttgggggtaggttcaggttggtaataggagcaggagagaaggcagtggggcctgaagaggtgtgtcttgcttcagatctgtgggannnnnnnnnnnnnnnnnnnnnnnnnnnnnnnnnnnnnnnnnnnnnnnnnnnngtgctatgtatgtgtgtgtgtgttgaccacaataacaactcagtatggaaaataggcattattaacccccactggtaaaacaaacacagggaaactcagcagtaggtaaatagcttccccaaaatagaaatgttgtaagaggtcagctgggaatgggaagcccagttggcttgtctgggagtcatggtccttctgcccagtcaggtgcctctcggcatgatgagaaatggcacagcggctgggcaagggctctgtggaaaaccagcggggaactgttaattccacctcagagaactagacagggtttagcagaggggatgatatttgacctgggccttaaaggctgatgaggattcagtaggctctaaaggaaggggagctgtagcaagaacaatccgtacccagatgtgcctagactatcaggaggtgtgagggtcagcagaggagagatgggggactactgggaattaggactgagacattgggtcagggccagttggaaggatttcctttaaatgccagacttgtgtgccatggaaggccacagatgtcacagagaaagctttaaggctacctaatggaggatggactggatgtgggcaagagctgaagtcagggaaccaaggagacagattaagacagattaaaggtgcacaatagcccaggccaggacgaggatcccaatgggacagcaacacagggaacggagacacatagttgcatttgagaagcagtttgagaactcggtgagcaagctgggcgtggggtacaaagatatgggagagaacaggacagaatggtcagaacagatggtatctaagagagggagaggagctgcagggtgctgggaggactgatgggatttcagcctggaccgtgagtttgaagcatttataaggggctggggggatgaacatctagagacggttggagtatagagttcaaggtcaggactggagatttaaatatctcattagcacatgagtgtaaactaaaggtttattagagcattttatgacaccgttcagaaagcaaacaggagtcaaggaaaaagtacagaatgagaccctaggtttaccaacatttctgaggaaggagagaaagagaagggaggaagatggatggtaggacacagctaacatttcttgtctacataaagccagcctgggatggtgtggattacccctcccacgccccccacccccacccctggccccactgtgctgaaacagaaaaaggacttgtctaagttccaacagctggtaaatgttcccatccaaagccaggacttgctccattctgccaccccgaggaagcttgaacgagcatgcagtggagtaagggtacaagttgggcagagatgaaggcggtgcagaaaccaagcgagtgaagggtttccatacattagagagtcaaggacagcaaggtttgatgagactcttgtttttcagtaggaaggaactttgggggtaggttcaggttggtaataggagcaggagagaaggcagtggggcctgaagaggtgtgtcttgcttcagatctgtgggacttcttctccaagcccacatatgcaaatctgtcctttctagcttggctcactttatgctgataatagcctctctctaggcatacgcccttctcatcccactccatgtattgtgcaacagtaaaaaacattaattatcctggcgaaggcaagcctagccttccccccgcaccccgtactatgcaggacagttggaagcagacaagcctgtcagcagatgaacactgtctccatcttagccctgctgcagtggccactggagatacttgggaaaccaaacctttctgggttcctgtgaccctgaagaagccacgagtgctcactaaactttggtcttcttgactgtattcaggggagctgctaaaggctgccgagatggctcagacatgaagagcactcacccacagctctttcagaggacccacaaggcaactcagggttggccctcttctggcttccaagggcatcaggcacatgtgtagtacacagacatacagacaacaaaacacctatacacataaaataatagaaggaagaggaaaaaggaagctgttcagctttgactgtcccatttccacatatccaaactcctaaagcaatctcccagacaactcagccatgataaagtacacacatagtcccagcacttgacagatacaggcaaaaggatcctgggagtctgaggctggcttggactgcatacctcaagaccttgtcctagagagattagagggcagggagggaggaggggaggagggaaggagggaggaagagagggagaggagggagagagcaagcaagtgagatatagacagacagacaggcagacagacagactggattggggaagaactcagactctcctcctctgccaatggaccctcatcaacctgtcaatctgctatagatgttttctggctgtttaaacatccccctctaaagcctgaacccagttttttctgtctcttgcccttactctcttcttctcacacacacacacacacacacacacacacacacacacacacacacacacacacacctagtagtttaactttacataatctggagaaaggaatggggaggggaaaccaacactgctttttctttctgccttctccttcctgtcaggtgatcatggtgaccggggatcaccccatcacagctaaggccattgccaaaggtgtgggcattatatcagagggtaacgagactgtggaagacattgcagccaggctcaacattcctgtgagtcaagtcaatcccaggtgaggctgttacaaagaccgcattgctggccaacacatcatctcccagagaggccccgagtgtcccttgggaatatctggacagcatccctgggacccttagactaaagtttttcctttgacagcccaatggctggtccctcagacaagcttgtgttcaggctgtgccaccgatgagctgtgtcaccttggaaacatcttgcagccctgatctttcattttctcagttatgaaattcagatgctgtccacactgcagttgctatagggatagaatctgcctagcaaatggtacttctgcttgcacgggaaggatgttatgtctcctctgagagaaatagcaggactcggcttcacaaaagggagcacagaagcaatagtagagtcccacctcccagaggaactaaggcacacagcgggtgggcggggaagggcagcaagaccggcatgagcatagatgctgtctctgctcctaccctccagagaagccaaggcgtgtgtagtgcacggctcagacctgaaggacatgacgtcagagcagctggatgagatcctcagggaccacacggagattgtctttgcccggacctcccctcagcagaagcttatcattgtggaagggtgtcagaggcaggtgagcaagacagtgagaggcagagacagggccaagtcaggagccagaagggcaaggactcgcttctcaagcacctttggtgtcttccccccatcccagggagccattgtggcagtgactggtgacggggtgaacgactcccccgcgctgaagaaggctgacattggcattgccatgggcatctccggctccgatgtctctaagcaggcggctgacatgatccttctcgacgacaactttgcctccattgtgacaggcgtggaggagggtgaggaggctgtgtaggctacatgacatccaggatgtctgaaggcagaccttctctttcctctgactttcactctaagattccacgctgccacagctttaaaccttcctcttagaaaaataagcagccagccacagctcaggggctagggtggggagggtcccttggatctccctgacgccctcagaacctctccacaggccgtctgatctttgacaacttgaagaagtccatcgcgtacaccctgaccagcaacatccctgagatcacccccttcctgctgttcatcattgccaacatcccccttccactgggcactgtgaccatcctctgcatcgacctggggacagatatggtgaggccagagggcagagtcgagccagactaggcagtcccacagaataggggtggggtgagctgcacccaggcacctgactagatcctgaccagtagacagcagatcagcacaggcctggaggaatataggaattctctcttcaccacactctagtactggggattgaacccaaaactcactcgtgttaggcaagcactccacccctaagctatgtccctagtgatgacaggagcttatataccaatgtgctgaattctgttggtgcttcactgagcagtttcacagacctcttcatataccttctccctgtgtcctgtgtgtacaggttcctgctatctcattagcatacgaagcagctgagagtgacatcatgaagaggcagccacgaaactcccagacagacaagctggtgaacgagaggcttatcagcatggcttacggacagattggtgcgcccagccagggcttgggagggtatcccctaaaggttgcttctagttcccgagagagatgagtgacgggtcaggaaagagtccagctgccggagagccagagacttccatctctgtctccaagggatggccctttccctcccctttctctactcaagtcccaccttttgcttacaactgctttcaggcatgatccaggctctgggtggcttcttcacctactttgtgatactggcagagaatgggtttctaccatcgcggctgctagggatccgcctggactgggatgatcggactaccaacgacctggaggacagctatggacaagagtgggtgagtggggctgtggacgtgtgccgcagacgagaaggggcgggactgaggctgaggtcctggttggaattggctaggagcagccaagaggctgatgatgggctaagtgccaggtttaacaagtgtcccttcctctcttctgcccagacctacgagcagcggaaggtggtggagttcacatgccacacggccttcttcgccagcatcgtggttgtgcagtgggctgacctcatcatctgcaagacccgtcgcaactcagtgttccagcagggcatgaagtgagcacctatcactaccggtccctaccaggcagaggcctctgtacatagtcaccaacccacataggccaggattccaacaccagctcacctaagctcccagggctcaggtttgctaaggaactgtctggttgtaataacatacttaaccttggcggtgttagaaacagatcaaaagtgaggacggaatggcaagactctttctcctgagttgtaacattgctcggaaagttactttgttatcgtttcctcccttcatgttcatcttccatgttttctttttgtctttcttcctcctccttccttcctcttccattccctagttaaatggcatccattccccagttctaaatcctgggtcaggtctcctgtactccataccaacacttggcaggtagccgggtttatagcattgatcttgtgtgctgcatctgcctaggggcacattcaggccttcctacagtgtggcaccatatgcttcccagggaatcaagtgtctcactctaatcttaaaacggctcctccaggtgggtatcattggacattgtgtgggcaagaagttccatgaggttcaatggttaggccaagcagctgctcatggttgtctgggttggtctcttcaccccacattgtagtatctcacctgtcatgcgtacatctgtcacctcatccacacgtgattttaacacagataggaactgagtactgaaagagccaggctcttttttcccctaccataaacaaaggtcactatctcagggaatctaagaaattaggcacagacctgtacaagacacttataaggaagtatgtgggtgacacaggaagtagagacagagccaaactgattcagtcagtccacagagaggcaaataagaacgatacaacatgagcaggaagctaagctaaacccaggaagaagcattgatacccataaaccacctcgccagaggcggcctcagagtgcccaggcctctagaccgttagcagtcctcagagatactgtcagcaacatttcaaaaggagatgtgaaaccaggctcttacttgcaagaatctgccaggttttctagtgggtcatccttagataatccttagtgacagcatattaatccatattaattcttggaacccatgaatatttataataaattttaatacattcaccactaacaagtataaattgggagacaaaaatcaattaaaatatgggctgtgtggaaaaggaacaatgagacatccctgtgtcccctccagccttcacctcatgcggtttgtaactgaaggaaagttgtcttcttttctccttattatacatagagagcaagcacacagctccaagaaattaagctctcatcagtcacccaaagtcaggcaatggagaagccagccacacttgacagatctgactctaggaactgccctcagcactttgctcggtactacttttaaattctgatgcagacaacataggttaaccatttcctgtgtgctatcacaggagcaagccttggctgggatcagtatctcacaagcatcctcttcattcagggtctgtgataagcaaccacccaggtcgaaggagatgccgagaaagagggctcggtccagaggagcttttaaagacatcttgttgggaagacagcatcttcccagcctgcggacctagcgcacaataacaatatcatatgttgcctgtggacaggcccctgttgactacaacatctctggcacagagttacataagaaataactatttaatgagcacacacacacacacacacacacacacacacacacacacacacacaacagtaatcagaggtgaacagaacaagcagaagaaaacatttgtttcctttggttatgtaaaacatgagagggggtttgaaagggacttggatgaaggacttcctcacattccttctggctcctttcccttctgtccccagggatgtccctggagttccacctcccgctatcctcccacaaatctacctgccttctttcctttgtctttctaggaacaagatcctgatttttgggctgctagaagagacggctttggctgcctttctgtcttactgcccgggcatgggggttgccctccggatgtacccactcaagtgagcgtctctctagggctgatggagagggagcaagatggactttaattctacctttgtgacactgttccagcctctgaagctcctgacacttccctctgttgcttccagggtcacgtggtggttctgtgcctttccctacagtctcctcatcttcatctatgatgaagttcggaagctcatcctacggcggtaccctgggggtaagcatgtccactctgcagagaggtctgtctgacctaaggtcccaggagccctgagcatgcccaccccggcccttttcctctatatcctgtatcccatctaccttagggttctctaaggcctccactttcttctagagcagtgcttctcaacattcttggtgctgtggccctttaatacagttccccatgttttggtgaccccctcccccactccaaccataaagttatttcgttgctacttcataactgtaactttgttactgttatgaattgtaatataaatatctgatatgcaggatatctggcacgcgacccctttgagacagtagaccttgggaggcctttgggcctgacctagttcttgtcttgacttcaagcggtggagttttgctttgacctgtgaaagggtcatttgactccccaaagaggtcacttcccacaggttaagaactactgctctagaagtccaggttcgaatggtcaggttagaagggcccttcaaggtcatccaatcctctacacgcttgctgataaaaacgatgcacagaggtgatgtatctgtttaggatcataaggaaacccaaacacagagctcccgattcccaggcatcaaccaaggcctggttcatgttccttagacacatctttgatcatttgctgggttgaaatggatggcctacaaaccacacgcgggctacggacagtgtttggtgtacagtggcccaatattgtgtatgtgtgtgtgtgtatgtgtatgtgtgtgtgtgtgtgtgtgtgtatgtgtgtgttttaatgggcccaatatctaaagctttggcgttttcacatggaatctaaaatctgacttctgaaacaaacattaaggccgtcagtctctgtagcaccagcgggacagctgcctccttaaatgcttgctacctgggaagcccagcaggcattttcagcatctaccacatgaaatacaagtctcccctgaagacagacttgtcccctccctcccagttaagaacatccagcccacccagcaagcccagggctgtcctttccctctaccctactcccctggcttcttctcctctctaaactcagctattgaagccctggtcaaccctaaactattcaggccctgggcggggttgatcttttgcctccttttatgctcctgctgcaacctttatcctatctctccaacaggctgggtggagaaggagacgtactactgagctcagcggcaaaggaagaacgaggggcagggggagatggggtgctggggattgtggtgaagggagggactggggagtcagaaggaggcacctgagggaactaagatggcagccttgggcaaataaacttgaggagactgctccagctgctccacagatcccgctgtgaaccctgggacagatcacctcttcagatccttcccatcccactctgctacattttccgaaaaactaggggtcaccccagcccttcaccctcacctgtattattcaaacagatcaacacccaaaggttaatcccggctaacccatgaggaaagcctctcaagtcaccaagtgtcagtgacccttggcttcattcctcttcccattctcgcctcccttcccttcctaccctgctcctccccctcacaccttgaaaacacaaaattctccttctgtgagtacaagagcctgggaccagaaaaggaagccaggtggagagattaggtctgtctcccagccaaggccagtcaggaaccagaggggagctgggctggcaaggaaaggttggggtgtgctggctgaaggagagaaaggagagaaaggaaagaaggaaagaaggaaggagagaaagaaagaaaggaaggaagaaagaaagaaagaaagaaagaaagaaagaaagaaagaaagaaagaaagaaagaaagaaagaaagaaagaaagaaagaaagaaaggaaagaaagaccacaggtttgtcatcttcagcctccaggtaggtggggtaggctctggctctgtgtcctgcctttagagactagcacaccagcaaaccaaattcccatctcgtcagagtagcagtaagggcaagcccaggggggtagtgtgccacccagtgacccattgatccttgggtaatggtcctctctgtccataaggctcaggagtcacagaaggtccagctatctcaaccccacactcttgggaacacctccccgcctttttagaacagtaagttctctgtggcctcacactgttctgagagccccattagctgccacttctccctgtgctctctcattcccttctgcttcctgcacatctgctgaacccacgtcatttccggtactgcctagttagtcctggaaaaggctctcttggccattggcaggaatcagtgtagaaaagtttccaggacatccctggctttccagagcatgcagaatcagcgtagctcatgacactgtcagacactttagacatgagagaaattcttaagagacctatgcctttggcctctcagatggcacggccgctgtacacagggaagtgttcactttccttgagacgggaagctggcttcaggttcctatggaatagagttttctttccttattcccttttcacctaacagttttgctcttcggacagctgcccattccctaagcctcgcctagaaaccatagcatagatgtacctagatgaatgagccaagcaactgagaaacagcaaggaaactggaaggcttgaggtgggaatatgaaggtcaagacaagaattagggagctgaaaagatggctcatcagttgactgctcttccagaggtcctgagttcaattcccagcaaccacatgatagctcgcaaccatctataataggatccaaacactcttctggtgtgtctgaagacagctacagtgtactcataataaataaagtaaataaattaaaaaaaaaagaaaaagacaagcattaggccagggccacgggcctcccaagggcaactgtctcaccacagtggagttttgctttacccataaataccttgaactttttcagtcatgtgtggccttcagttggaagtctaaatgggacaccatatttatttgggcctgattaatttgagatcattgactttgaacaaaagtttacctcccgcacaatcaataaagtcatctggtcggtaaatgaagagcataaacaatattgttaggagcggtatatttagtctcagagtatgcttctcgagcactttagaaatctccctctagaatcagcaagttcaccggctaattattctcagccctgatctatctgttaaaggaacgtctacaaggtccttactagcgaccttctgtgagacattagtttgaggcagtacatgtatacttgaaaataataaagttgcatttctttatgaaaatttacaagagaaactgctcccatggttgatttctatacttaatattggccttcccctcagactgttgtactggatgtgtgcatggaaggacttggcttgctaagggaactcgagcggcagggaagtaatcctgccacagaccatgctctaaaggggagaaagttaaatttatatatcctcgtcctcgtagccaggcccgccaggagccataagggtttgtccaagacagggaagagtagctaagggtccatgacaggcaaggacatttcaattattttttctgtttcagacaaaatcagtccactcccaatctaaggggcatggaatagaggttttgttctggggccacaacagccaagtcagtgctgaccaatagcatatactgtacccagcgccatctttagggaatgaggtaaaatgcagacatcattgaggtctccctgagtaggtatccgagaccttttcgtagagcatgcatgtggtgggcagaaggcgagacactgtgcactgaggtgaggaacaagatggtgaacattcctgcaggagtcggtggggatgggagacagggggacactggctcttacaacccactctcaagtctcagcctaaccatgaaaagcctgccccagtccaagatgtgtaacggcccctttattacaactctcactgtagtcatggtgacggtgcttgtctcagaggttgtcagggtgacggctgctccctcggtgtctttaaaaacatcagttttctttgtaatggttaagaataaacccggattaaagtttactttgaccgcacctcagggcctgggttcttgatggattctctaccaagaacacttttcttttccttccctggctttcctgcctcatactgacattagacattacatctccttgggaagaattctcatggctgccctcaaaacactggcattcctggcatttcttttctcttcaatttgttctttattcataaacactaactcctgatcagcatgggagattcgagattcgacccactctgtgtctggacctaggctgcttcaccctccttgggcaacctggtggtcccctgcctcccagaaggttgccatattgatgctgaacttagtgtgggcatctggttagcatagtgcactacagtccagaactcctagactcaagtgatccttcagtctcagcctccctaatagctgtgactacgggtatgtgccaccaagccaaacactaactcaaatttaggttatgaaaaatggatggatacatggatggatacatggatagatgagtggatggatggatggatggttggatgcatgggtggatggatataatatactacgttatatgcacataacagtggctagagagacaactcactgattaagagcactgagagctcttccagaaggaacagggttcaatttgattcacagcatccatgtattgacccacagctttctgtaacttcagtcccaggtaacccaacacatttttccccctctgtgagcacttcatgcacctggcacacagacatgcatgcaggcaaagtacccgttgtcttagtcactgttctattgctgtgaagagacaccgtgaccaaggaaactttttcaaaaggaagcatttaattgggacttgcttacagtttcaaaaggacagtccattgtcctcagggcagggagggtggcagcacagaagcaggcgtggtgctggagaagtaacagagctacccctgcagagagatcaggcctagcttaggcttttgaaacaccaaagcttatccccagcctcttccaacaaggccacacctcctcatccctcacaacagtccatcactgggaaccaggcacacaaacacacgagcttacaggggtcattctcattgagaccaccatgcccatacacacaagatgcatgactaagaaaaaatatggagagacgcaactgcctgctagaggatcttggccaacatataagagattctgttggatgtgatgctagaaagtagtccaggcttccacccagcaggaagaattccacacagcatgactccttccccaagagaactggacatgtgataattcaccaggagaagatgacaagctaaagggtcaaaatacgaagaacgcatccctacatggtagaaagtcagcagctcaataccaatcgcaaaggaagatgttgaacaaaaagattgtttttgttttgttttgtttttttctctgaaagaaggtctcactgtgtggttctggcatgcctgaaactaaagagatagaccacactagcttcaaactcagatctacctgcctctgcctccagagtgctggaattaaattggtgaacccagtcaaatgagtctttaaaaaacatccttgagctaggtaggcctaaggacatatgtcagtaatctattcacatgagaggctaaggtaggaggcatgtaagaccagcctggacctcaaagcaatactacatctcaacaccaaatgagctgaggagatggctcagcaggtaagaacactcgctactctcatacaggacacgtcttcacttcctagcgcccacatccagagactcacaaatacctgtaactccagatcaaggaatagctgacaccctcttctggcccccgatggcacctgcaaacatacagtgtatacacctacacttgagcacacacatacccataatataaaataatcttttaaaacaaaaacaaacaaaaaaccaccttagtttcaggattcaagtgtttttcccttgaattcttctaagaatattcttatattatttaaaccctactagactatagagagaaaacattttgaattgcctggcttattttatgagagataagtgtcattttaataacatttttataatctgataataactccatgggaattcagggaagtgtatgagaagacagctgtgaggaacaattcatcaggactgaagccacgtgatgaaacactcatttcaaatggctatgagaagggtatccctaaaactcagcatctactcctgcctcaaacagtgaggaaaagaaaacatactgagaaatgtaattgtgttcagaaaagagaagaaggggagaagtccggaatttgatgtcagcctttgaaaccctgagttaggaaataacactttaaaacatggaaacggtggctggggagatgtgctgaagagattcgtgtcaggaaagtgcttgccacacgaacatgaaggacctgggttcagaacccacccaagcacacatgtgaaagaccaggtatggctgaatgcatctgtggtcctgacacagggagatgcacatgggacaattctattgcttgctggccagtgagccttgctgaatcagggaattctgagttcagtgagagattcttcctcaaaaataaataaataaataaataaataaataaataaataagatggagaaagattgagaaagacaaccaacttctaactgcgtgtacttaaatctacctacccagacatgaacacacacacacttttaaaaaaagtaagctaagcatagtgacccacatctgcaaatctcagcatttaggaagttgaagcagaagaaccacacatttgaggccagcctgggctacatagtgagactatctttaaacacacacacacacacacacacacacacacacacacacacaaagaaagtaaagagacaaacaataacaaatgaaaaaatattttttttgaaagagcacaactgcctataacaccaagaaagtcagcttgtggtggtttgaatgagaatagtcccataggcttatcatatatctgcatgcttggtccctgttggtagaactgtttgggaaggattaggaggcctggtcttgttgacagaggtgtggcactggggatcttgaggtttcaaacgtctatgctgttttcagctacccctgcccccatctctctgctttgtggttgttgtctcaatatgcacacattcagctaccactccaataccacgcaggcctgcctgctgtcatgctcccatcatgatgatcacagactttggaactgtaagccccaataaacccttctttcataggtcgctttggccatagtgcctcttcacagcatcagaaaagtaaggaagacccaacccaaacagaggaagagcagcagcagcaacgagccccggaagcaggatgctcaaagtcacaggattcaaaattcagtcaaatgcatcttctaacactagagacagaagactgagaacaaaggacttacctttgcaacagaatcaaagcaaaccaggctcgagccttagtgtgttcagcacattgatttaaagcaaaattaaaataaggaggacaaaaataaaaatgggcatacatggagagctactgctggctgctgttcaggaagactgaaggcacaaagagaagcaagttgctctaaaggagtcagtccaacttcagtcaaagccctcgctgtatttttaatgaaatataacacagtttgtgacattcagctgtaatggtaaccaggaagcatctgacttttgtttttaatggatgtgagtacacactctcggtcttcagacacaccaggagagagcatcagatcctatcacagatggttgtgagccaccatgtggttgctgggaattgaacttaggacctctggaagagcagccagtgctcttaaccactgagccacctcttcaaccacagcatctgagtttttaaagagtaaattaataaaggctgatgcttagcctatttaatcacacagattttaaaacacttctggcctaagtggcttcattatcgaaaaaatcttaacaaagatgaaatctgaaagcttaccacttgactttgattcgggaactacttgtggattggctgctctgagccaggcctgctccataggcctggatacagccagcaaaggtcctggggaacaggcaattcgtgagtccacagattatgggcaggagcgtctcagagggtgagtgtcctgtgaagggtgtctaggcttggccttgccagaggccctgctttgtatttcgccatcagagctttctctggaaaggtcagcctttgggctaagatctgtggatcgcaatgagcattccgaaaacaatctgaatgaatgatgtcccctctgccctgcctctgcacagtaccaaaagagaaacgtaaacaccctcgtttctcaaaccctatgatccacagtgctctcctgcctgcaagatctgctagggcaatggggacacaaagcttgtgggagtaaccaaccaatatctgatctgacatcgcccactccacgagatgggacccataccccacactgcttgggtgaccaggaacctaagactaggaccaaataagactggtctaaagaatgaagtgtgtgtgtgtgtgtgtgtgtgtgtgtgtgtgtgtgtgtgtgtgtgtgtaagatgactcctaatgacattctgctatactcctagagcagtgctttgctcagccatcatcagagaagcttcctcctgcagcagatgggaacagagacagagacccacagccagacattacacagagaataagagaccttggaacactaaaccttaagtgggatgtgtccatcaaattcctcccctcagagctcaggggagccgtgtggaagagaaggcaggaagaatgtaaaagccagaggtgacagtggacagcaagagaacaggccctctaaaccaacacacgcaaagctgacatgaactcacagagactgaagcagcaagcacagggcctgctcgggactgcacattgggtgctctatatttacattatggccttaagtttagtgtttttatggaattcctaagtatgtgaatgagtgagtgcctgactctcctgccttctcctgggctcttttccctctgttgggttttcatgcccaacttccatgtgatcgcttttgttttctcttttacattttatttatttaaaaaagaatgaatgaatgagtgaatgaatgaaaatctagccactaggataaaggtgaaccgcagaactgtcatttatacctgctgagagcaggaaaaaaatcagttttttccagtggaatgacactgggtatatcaaccacaccagggggaggtcacatgatcaggaataattaaccaacaaataacggattctataggggtgtgtgtgtgtgtgtgtgtgtgtgtgtgtgtgtgtgtgtgtgtgtgtgtttacttttatttggttacaatttgtgctttttgctttgttttttcttttggggagtgttgatgtattttgctttctagcccgtttggggagtttattcttatactaatggttttgttttggttttggttttggttttgttcttgagaaagaacttaaagttaggtgggtatggagaaggagaagatctgaaaggacttgggagagaagaagatgatttaaaattgaatatgaccagaaaatttaaaaatggttttatataataaaatatttttaaacaaacaaacaaacaaaactcagagactgtgagaaaacattgacggtgtaagtggcaagaagtctaacaactcaatttaagaaaaagaaaacaatgtaaaattgaaagaaaacaatgtaaaattgaacaaatgatactatagctcacaaaaagaaaaatgcaacccagaaaacccaccattatattggaaaatacttgcacagacaataaagaaatgcaaattagccaagcccctcgctctccagaagccaaggtcaccccagtgaaccgtagacttccttatcttattgctgagctccagggcagtgcccttctaatagcagctggcagaatatcttaagattttaagtgagcttaccttatgattcagcaaaggaaatcgattctacagaaatagaggccaaagccacctctaaccactttgccagggtggcagtgtttttcacggttaagaaaacaaatggaaaatagtctctctgtgtctcagcagcaggaacaaccacacacaagcacgaacaatacagactactacatacggaaaacctacgagaccgagagacgggcctcagcgcctgctgagctcagaaatgaaaagaggggtgaagattgaaaatgcagctctcctggggttctatttgaatagacataggaaaaactgggaagctgggcagcatattaacgccagttacgggaaactttgggaagggaaaagggacttctagcttttattttctactttttttttttaatgcaagatctcactatgcagcccaggctggttgcaaactcaaggttctcttggttcatctcctgagtgttggctgagattattttatcctatatatagcagagatgtgtgtgtgtgtgtgtgtgtgtgtgtgtgtgtgtaggccagagattgatgcagggaatcttctattgccttccaccatatcttttgaagcaaggtctcactgaccggggatctggccgatccagctagactggctagccagctagctccagggatcctcttatctctcaggcctgtgagcacagacatcatagtcagtgtttaacctcggtgcttgggatctgtaccgaggtcctcaggcctgcatggcaagctctttgcatatggagccaccaccataaccccatttattttattctttttgctaaagaaggaagaaattttctgaaaggaagagactaacctctgtttgtttgtttgtctttttggcttggggggggggcattttgttgttattgttgtctatctgtttttctatgtggctttggctgtcctgaaactcactctctagaccaacctggcctcgaactcagagaacctcgacctctgcttccttagtactaggattaaaggaatggaagggccaccaccactaacctgggttccatctgggaagggaacaggtgcgaagaactacatcagtacagtgatagacgtttccgggtacccttatagtcacaaccacacccacccagccaaaatgcaattaaacaaataccaaataaccgaagtgtatgggatactataactgaaaaaaatataattgacagaaatagatagctgcttcggatccttttgaataaagtatttaaaaaaataattatcacaatgcagtaacaattagtgagaaaaaaaagaggccaagaatttgaaagagagtgggacagacagatgggggggtttaaggggaagagaggaaagagtattaaacacaattagcacataaaagtcaaggcgcttagaaagagcttagagcgggtcaacagaagagctgaacgcatcatttaattgtgtacatttttttttgtatgtaggtgtatagtatgaatgtgaaggtcagatgacaacttgcagaaggaaattggttctctccttctaccccgtgcatgggtcctggaggttgaacttggaggtcgaacttgtgtcgtcaagcttttcaaccagtgctcttgcctactgagctatcttgccagccaatattgtacagtaagggatgactgtacatcacatgggacagtttttattttcactgagaactgcacatgtagctgcatgtgaaacagtgaatccaaactattcattgaacccagaccacgtaccaccagaagttattttttgtatggagcaaggcttctttaagtgtccccctcttttctcctgagatatcgttatacaactttacatactaatgagaccgatgcactcatttatataaagagctaaaccttggataaatatttgatattacccagcaatatttttcagagttgattgatcaatgtttttttattatcaaacacctgtgctaacaaagtcttttcttgctaatatgcagtgcaaaatagaagtatgtttcaaagattgctgtaaaagttatcctaatctcaagccaaaactcactcagtgatttttttttatatacaattttaatggaacccaaggcatcaaacattcttgcacaatgcaatccaaaattacaatacttccacaccaaggaatcatgggatgagaatattagaggtcattttcttcatgtttctataagaacagaaaagtttgtttgtacagtgaaaacaccaaatgagggaggggcaactcagcagtaaaggaacgagatgcccaagccagagggcctgagctctcaacctctgggactcgcgtgataaaagagaaagactctcacaggttgtcctctgacctccacacaggcactgtgccatgtgcatgcatgcaacacacagatacacacagatacacacagatacacacagacacacacacacacacacacacacacacacacacacacacagacatgcacaccacaaactgagctacagtatttctggcaacatttgttacacccatacaacagtgccaagtgggcatggcatttgtttagaaccaaagctatagagaagctgcatgacagaacaggagtgggcaccggcagaaccctgattcattgcatgcttgatttcaaacaaatcttttgttcttttacactgagaacctttttattgttgcccgcgcactcacacacgagtgcacacacatatggccatttagccgcaccaccagttatagggtggccacatacagtttgaaaagctaggatgtagagcacctcactttaattctggctcttgctactttacaaggtagaaggcattattttaacagaacaggaaagtacagaagcgggcagtgaatttgtacagtcacacagatgttagatgaggactcagtattcagacacagagtccatctctagaaataaaaaaataaatacagtattggccagtagctgggcctcagtagagctggaaatgtcagctcacggcactaaccccgacgctcagaggatgcagagacaagagaatcagcacacgttatagatcataccagtacagagcaaattctaaaccaataagggctatgtagctaggctacacacacacacattactgttttgatttgattgagccacctaactggagtgtcgtccctagcctcagaagtcacaagaccatgcatgcgaagacttcgttctaactttgctgtctgatctaaattctttgagccaacctgctccagtcaccctcacccaggtggagggaggtttgtgcgttcttggttagagctctcatgagcccattatgatgccaggcctaggctgtcgccatagcacccagaggacccagggctgggagcaccaggcctgcccagaagctcactctgacctcggctcccactgcacttcccacctgctgaacccctgcatcttcatcatttaggtacctgggtaccctttgtgccagtccctgctctttacctcaccctctcattcagagtctagactcactccacttggcgcttccttctccagctttaccactcagacttgctcccttcacctttcctttcctatgcttatagatagccctctctaccttcccactccttggctgacctttgctctttccaccacactggcctcaccaccaccacccccaactcctcaactcctccccccactcactcccctacccccttaaccctcttttgctttctttccaccggttgagcagagccagctatacctagagatcatattatggagcctggaaaagaaaaggaggtagaggcccctggtgagctgaatcagaaaccaagacccagcaccaggtcctcaactacaaatagacagccgaaaatgaaaagaaggaagaaagatttagaagagctgaagaaggaagtggttatggtgaggatggccaaagcaaactgcccttgaaagacccttcagcctttgcctgatggcttccacatcctacctggagaagaagcaaagcacgcttccaggacggtcccctccaaccccctccttcctccctgcacatgacctgaggtcaccatctcaccttaatgactcttctgttccctcaggatgatcacaagctaacgttggatgagctgagcgccaagtactctgtggacttgaccaaggtaagaactgcttgaagcagaacggaagtcctcagtgacttgaggacactaaccagggcagcgcagaagctgaaagtgacccccactctcaactccagatccaactgtgtacctcttacccttagccccacaaagctccacacaactctacttggaaaaaatggtcacagtaactatctgagaaagttgtgatggtgtggatggttgggaatatgccttttgtcttgtcctctagacctgtttatactcttaggatttatcaagaactccaaagagcttttgcttaggtaaaaaataatgttattggtatttgccatggtaaaaattttaattggcaaattttaaaagtatttctgagttcctttataaagagtagttgctggaaatgtggctcagtggcagagcatcttcagcctgagtttgatccctagagtcatgaaagaagagaaggaaaaaaaggcttattataaactaacagcaatatttttttaaccaattaactatttttccaaaaaaaaaaattagtgtcatcttacattttacaaatctctttaatacctaactttattttatgtttgttttcttgagacaaggtcttactatgtagctctgattagcctggaacccactattatgtagatcaggctggccttgaactcatagaaatccacctgcctctgctgggatttatgtatgacactatacccagcatttaatttctagttttctaatagaaaaatctgaattctcataccttttgatattaaatctactgggatgtatcatgacatctttggaaaacttcaagtgttatctttctattagtgtgacaaaatatctgaatctgtggtgtttggacaagaagggtccccatagatttatatttgactactttgtcctcagttggtggaacttcttgggaagaattagagggtgtggccttgttggaggaagtgtgttactggggctctaaagttttaaaagtccagccatccccagtaagctctgtctgtctgtctgtctgtctgtctgtctctgtctgtctctgtctgtctctctctgtctcccgtctctctgtctccctgtctctctgtctctctgtctgtctctctctctctgccttgtatctgtggatcaggatgcaagctcacagctacagcctgcctgctgccataatccctgccatgatggtcatggttctaaccatctgggactgtaagccccaacaaacactttgttgtgtacgttgccttggtcatggtatctcttcgcagcaatagaacaaagtaacttaagacagagacaaacaatgtaaaggaggaaggagtcactctgacttggagctaggagggttcaggccagggtctcttggctccactgctcacacttcatctgtggggaggaaggaagccacgtgatggaacacagctgctgacttcatggcaaatagggagatgaggggagaatcccaacatacctttcaagggcacctcccagcagtctatttcctcccctgaactctcccgacagcaccctcacaacaccaccatcagctgggcgtcaggtaatttggggaatatctaagagtcaaaccataacatttaccatacacttttttttttttttgaggcagggcctgactatgtagatcaggctgtcctgaaatttggtggccaatcatccattcctcaaggatgagtaaagatgacaatgatttagtattgttactaaaagctttagactcttgagagaatattgaagccccttaggtctttttgaagacaggctaagggaatggctgataggttctggtagattctattatcatataatattaaggaaaaatcgcagaagcgcatgcataaggccagaataaaatccatacattggtgtctttagtttgatttttcccttgtttccaatttggaaagccaaagtgtgaaggacaagatgtttccagcatcatggatcatggccccagttaatctagtatattataatcatctctatatgtttgtttcccaacttgagctccctaaaaataaggaacattcttgaatttcattcattcaattgattgattattgtgagcacctaagtttatgtgtggaggtatgattgtgccactgcatgcacacagagggcagagaacaacttgtggaattcagttctctctaccatgtgagtccaagaattagacttaggttgtcatgccttgctgcaaccacccttcccttgagatggttgtcatgccatctcagagtccctttgggtggagaccattcctattaatgatgatattctcagctcctaccacatgaccaagcctcaagataaaatactcaagttcaaaaggttgtaaaccaatccacacacaaatgcacaaacaaacaaaaaagctctctatgagtaagcatgctaaatgaaaccccttctacaatacaaattcttattggaaagaatcttcagaaggctcttccgcggctgctttggggtagacctatcctgaggctataaccagtaggtcctctcgctgtaactggttctttttcacagctgcctctccatccttatttcttctctacacagggtcttagtgtcctagaagcccaggatattctgtttcaaaatggaccgaatgtactaactcctcctccaaccactccagagtgggtcaaattctgtagacaactgtttggtggcttctccctcctactgtggactggtgcctgtctctgcttcctggcctatggcatacatgtaaattattacaaagaaaacgccaacaaagataatgtgagcttgctccctccccccaaactcccaaattctcctcacccgaatccccaatagttcagaagtttctggggaagctcttgatccatcttggtctcctgcaaactctatctagaaagcttctagtttagctccctaaaaggcgttattctaccagtctactcgccaagtggccatcacagtgtttctgcagtccctcccttccccttttgaaagatttatttacttatttaacgtatataagtacactgtagctcatcttcagactctagctgtcttcagatacatcaggaggagagcatagatcccagtataaatggttatgatccaacatgtagttgctgggaattgaactcaggacctctagaagagcagtcagtgctcttaacctctgagccatctgtagtcccccatttcttattcagaatgccaacctcttcatctcttgcttcccttggctcattgtccacctcctgccgatagagggagaggaagattctcattctctaggagttttctgaccactcaacataataggttaggtcttcattaccaaggagccggggggccaacccttcccagatcctcctggaccctcagtcccatgacttcctccagccagaggaagttgttcccttggcaatctgaggatgcagagggaaaaaaggatgtgctaatgacactttctccatcttcagctgtacctggggattgtactatctgccgtggtcatcattaccggctgcttctcatattaccaggaggccaagagctccaagatcatggagtcttttaagaacatggtgcctcaggtacgtaggacttgtgtgggaagagctagtgagaggaagtgcagattgtgaggagttatataatcgctcagtccccggggggactgtcacacacagtgggtgcgctaagtggggctggtgatgaggagcctggaaagtaccaggagaaatggaaatcaagctccgatgacaatagccacagagtgtgtcactgaaagtgacaaggaaatgaagaatgaccctccacaacctaaataaggacatctattgaaaacgaagccgctggggagactgaccttaaaggcaatgtatttgtggaaatgttccagtttttaaaaagctaaaaggatatggcgatatgaatattctggtaaagatatgagtcctgggcctgatgctatgttgggaaataatgccttaaagagacattttgggtcaagtgccaaaagctgaaatgtatgcagtaaatgtgagcattgcattaaaatcaaaccacttgagacaatcactgtgctgtcatagaaaagaataacctaggggccaagagatggatccgcaaataacagcacttgctgcttatgttggctaattttatgtccactcgacacaccctagcatcacttggaaagaagggattcagttaagaaatataccagattggcatgtggacaagcctgtggtatattcccttgatggatgattgatgtgggaggctccaaatcactgtggacagtgccacccctcaactgtgtagtcctgggtgctacaagaaagtgactgagcaagcctagggagagcaagcctgaagcagcactccatggcctctggataatgaactgtgatgtggaatgtttaagtgacataaatcctttcctcccaaagttgattttgattgtggtgtttatccaagcaatggaaaccctacgaatctgttcttgcagaggacctgggttcggttctcacatcctgatggtggcttacaaccacctgaaactccagtttcaaaggattctcaccttccttctcttctgccctcgcaggcaccgggcatgaacatggtgcatatctacatacatacatatgtatatatgtacacacatatatatgtgtatacatgcatatatatgtatgtatgtatgtatatatatataatatttttaagagaatgaagattacataattctttgaaaatgcacacagaagtgtttaggataaactaccatgatgcatctaactttgagacaggaaaggatgaagcaactgaggtggacagttagtgagtgaaggcaggtggaagttttataggtgtgcttgtcactattcttattattgaagcttttctgaaatttaaattttatttttttaaattgaatgtttttaaaggtatctggaaatagtatgacagcagattggagttcctaaatacaggactagaggctttaaaacaaaaaacaaaaaaaccatcaagtctcccaactcatgcgacaatatcatcatgttccacccctgtaccctaggatgctcttctcctgttaatgtcaacatgatttaaacctttctttgagtaagagttttgactgggatctgggagtttatcgggtggcactgattgcctaatgtaccacccaaacatgacttttgtcaccgttctgtgcctgtgctgctgctctggtctaagctggcttcagcttgctctagggagaaatagaagataaccttattcactcctcggttgaaaggattgagatgttcgcagctcttgcttgttcatgggaacagaggggttcccaggaacagcagggcaaaccttaacaggaacaattttttttaactaatttatttatttactttacatccagatccaaagtttcccatccctcctctccttccggtcttttccctcttccttcccccatggtccgctccccccccctttgtcttcagaaaaggagaggcctcccttgggtatccaacagccttggcacatccagttgcagtaagactaggtgcatcttctccagtcgaggttagatgaggcagccactcaaggggaaaggtcccaaaggcaggcaacagagtcaggacagcccctgctcccactattaggagtcccacaggaagaccacaactataagatacgtgtggaaggacggcctaggcctaggtcagactcctgcaggctccctggttgtcgattctggcccctatgggtccaggttagttgattctgtgggttttcttggggtgtccttgacctctctggcccctatgacccttccttcccctcatcaggattctccaagctccaccaaatgtctggctgtgggtctctgcatctgtgtatcaaatagttttttaagcctttatttttatcatttctactaaaaatcttctgggccaaaaataaaaaatagtttacatggtcaattctacatttagggacaaagagatagatcccacctcttaatggaaaggccatcaaagtcccattgcagaggttgtgcagacagcaatagcagacctaacacagaaggacagagatggaagtggggagggttggagcgcaaccaggaagtgcaagaggctatctaacattatcttcctacagcaagctctggtgattcgagatggagagaaaatgcaaatcaatgtaagagatgtggttttgggagacctagtagaggtgaagggaggagaccaaatccctgctgatatcagggttatctcggcgcaaggatgcaaggtgaggagatgaggaaagctataggagggagcctacggcaatgtgtggctctaaggcacggtgaagacctgggcttagtcttaatccaatcttcttattcagaaccttgagacagtgatgagagtggtttgggggaaagaaggtgaggttctaggagtgcagatatttatctctgcatgttaatgacatgatggttctgacagataaagtggtgctgccttcatacatgaatctgacctttgtcctatgactgccttttaacctctccttcccatcccaggtagacaattcctccttgactggggagtcagaaccacagtctcgctgccctgattgcactcatgagaaccctctggagacacggaatatcatcttcttctccactaactgtgtagaaggtgagtattgtatatcatctgcagcccaggctcaaaaaaagaggtggaaacacatggcttttaaaaccttctgttttctaaaggtttcggggtaggaagacagtatcaaggttggcttctccatcactcaggtgcttaatgacctctgggggtggggatgggggggggtggtcaaagacatcatttccaaatttgtatactgttaatacaaaaactgctacccatcgattgcttttggactaaatgacattaaatgcttagcacaaggtctattacactgtaagcatcctgaagttgttgaccatggtttgaactggtggagaaaatagcacagaatagagggacattatccatctctgccaggtcactcttctacctccttttaccttccagaggaagctaccaacactgcaagcttgaattatcagagctgtccctcaaactctgccattcaaacactggctttgtccctaggatgaaagaaaggcactcctgagccagcactcacatccttctctcctttgccctttgcccttaaggaaacccaaacatactccagagtctacttgcaaatcatcattaatgcttaagatcaaatgtcttagtgtctgaagatgggtgctttctatggaatatataaatgtatataactatagtgtcaagaacgtcaagcactataaacattttttgttctgactctcacaatgtcacacacaaaactctatgaagtccatagaaattacacgctcaccatagagtatgacccaacagagaagagggagactagagattctaatgaaagtctgtctccaaagcccacgctcttgcctccacttcccacgctgctctacacggagtgctaacgacctctcttcattaaatcgcttcatttgaaaatgtcttaataagaacaataatgttcaatatacactaagggagaacccaaccagaaagaaattatatcatttgatgtatacacaatgtataaaacataaatattgaatgtacagaaaaatacaaattagcaagactcctctttttttaaaaaatgctgtattttagctgttatgttttaggagaaaatttgctcaggtttatctttctgaagtaggtttttcatcagctaagtctaggctgctgacaagcgggttaggcaagagttggtgaaggtactccagctgagaaacaagggtctatctgagagaaagggggatttaataggagacaaacaaaatcctaatgtagccaagagggtagaactagctagataggctaagggattttgttttgtttgttgaaatatctcaggtcttgctatgtagctctggctgtcctggaacttgctatgtagaccaggctggccttgaactcacagagatccctatgcaccagctccagagtgctaaagttaaagaagtgttctatcatgcctgccaagctaagttttgtacaagttgctacgtaatagcctttgccttagaccagtttcccctttaaccttcaccccagaccaatttagaaattactaacacaaatacagcgttatcctgtccccagccttcgttactatggtccttgataggcagtggcacaaacccctctctttgtgttcccatgcttccagggaacccgatctctctctgatgacacatgcaaggtgtacgagggagggaacagtctgtcctaagacacaggatatttgcccttatcagttttcttccggtttgatgctaacctgctccatctccagacacacagggagcatttattacatttaatcatttctagctagatatgtgaacggaatggatttaaacgacactgtagccacctacacccatcttatcaaaaatacaaaatcctttcagtatctttcagtcattttattactttcataaaggtttagagaacctgtcaaccagttcaaaggttgtctgcagtgtgttttacattgtgacccttgctagagtctccttccccataatactggcctaatccatccaagaactctactattagattcttttttaaatagttttgtgtgtatgtgtatgtgtgtgtgtgtgtgtgtgtgtgtctgtctgtctgtctgtctgtctgtgtctacatatatgtcctacatatactcaggagcccaaggaaatcagaagaggcaatccctcaaactgcagttagagacggctgtgaaccaccatgtaggttctcagaaccaagtccaagttgcctgcaagaacagtaaatcctcttaaccactgagccatctcttcagctccatgtgccttgactgttgctgaaggcaatcttagaactggagaccaccagctaccccgcgcccctgtgctagtgggatctgctcctactgagacacatgtatgattttacactgactctttgatcttttattcactggaataaagttgagtgtctaccatacatccaaccttgttctaggctttttcagagatatttgatttcacagttttgtgggttctttgttgtttctcctcttcctcctcctcctcttcctcctcctcctcctcttcttcccctcctcctcccccctccttttcagcctctcaaatactgggtttctaggtgtaactcacaggatctgcactgtgcttcatcccatgtttaataagaggaagccatagtcttaggaatcatggaactttatcttggggtggggggaactacttgtttaaaaagttgatggttcagccttgtgcccttctgcttctgagatgaaagttctttccatgggtttctgtccttggtcattctctgacttgaatggtaggaacaacaggctctatggggcagcagaaagaatggttttaaacaatcttgtttcaaagttgtgggtgagtgtcctgtaccatgtgtgagtaaagtcaactacatagggcgcagagctggtggggggaaaggccctggaaaggctcagggcacaggtgttatggctggtgccacccagcagaggtcagactagctctagtcagaaaagcagggagggggctcctcaaatagtgacactgaggactggagaggtctttgttctgagggagcactgtggggtgcttagcagcctgtggcttgcacccttccttttcctgtctgcacagaacccctaggtcttactgtagggattccccaccagttccccataactcactcagtcaaagtttgccacgaactacctcaaaatagcatcagatgagagctcagtcccatgagactcttcctactccagtctctagtccaagtaataggctgtcatccatacttctgacagggtggctgtgaactgcgattcccaggactttttccttaaggctctcagaagtcagggaagcacgtggcctacattttgcactcgttacagatgataggagacaagtgaacaggcagatgggagacacacacagggcctgggatgtgggcagagatgtggggtttctgtatcctgagtatgctatcctccagacatctccatgtgtttgccaggctggaagctctccaaacacagttgtcttggcttttaatggatgttttattacatagacgtgactggttatatcatttgccattggtaatcaactcaaccgtcagcctctctccccatcctggatgttgggttgtagagctgaaagcccaccctgtaatcccatagctggttcccctggcaacctcctcatccagtggctacccaagagcccaagagttgcctcattaaagcaaaaggttctcttaccacctagggattctatggaatttagaagctctctgtctgatattcctatcatgccagaaactataaagtgtcaggaacctaccatgataaaaaaaagattctcctagcaaaacaaccaaaagattttagaagttcaatgtcagtaactggggtggtgataccagcccaggcaatccttactctaccacagtatggagttatagtgtcttccctcattcataggaacagctcggggtattgtgattgctacaggagactacacagtaatgggccggattgcttccctgacatcaggcttgcaaatgggcaagaccccgattgccaccgaaatcgaacacttcatccatttgatcacagctgtcgcggtcttcctcggtgtttcatttttttggctctcgattatcttgggttacacctggctggatgctgtcattttccttattggtatcattgtggccaatgtgccggaagggctgctggccactgtcactgtgagtaaacaagggtggggaggggtgacctctgagcagacaaatgaccccagggaaaggaagtgtccctactaacacttgttgttaaggaacatctgaagtgaggggtatccctgagatacatagaagcgtcagaagcaatttagttcccacgagcactgcactgccttcctctacctgtgctgctgtgactactctgtctcctccgtgaaagaggaagcaagatgcaacagagaaaggatcatgctccagtctcaggtgcactggctgtgtcggccaaagcacttaagatcatcaggccttgtgcatttgttagtttatagagcaagattaatttaggattactgaattccaccataatggacttcgaggccacttaaaatcaacctttgagccaacactggatgccctctataaaaacccatggaagataactgtggtttgtttctgagggtgactgacatagctcctttgtctcagccccgtcttgttcttagctcactttagttaaactgagcagaaatatgattccctgttccatcctggttttcccaaccagaataagctggttctttgtgtcctaatggcctaagccctccacccccatgacaaccatcatgactcctcagattctccaagtaatcccttaaccattcttcctatgacacggtcttggctctctgtcttactaataacttgtttgggaaacttgttgctctagttttgtttttttttttttttaagatttatttattttatgtatgtgagtacattgtagttctcctcagacacaccagacagaagagggcaccagatcccatgatagatggttgtgagccaccatgtggttgctgggaattgaactcaggacctctagaagagcagtcagtgctcttaaccactgagccatcgctccaggcagcatattctggtttttctatagtcatcttaaaatagaaataaggataacatttagggtgtgttaggactagttttaaaatgctaggaactaaggatatagtgtaaataaattgtaattccataattgggattctatacttacctattcacagcacaatagtttgttaatttttaaaaaccaccttagcttccatttatgattttaaaacaaatgttctggtttaaatgatttccccgggggcttttcagtactgtgacatcctttcccaatgtcattaccattcccttctgcccaaacttttcagacactattggcaagatgccctatccatacatagcactgtataccacagtaaaacgtgacccagcgatgtggtccttgtagagagcggatctgaaagacagggagtggtctgggatggaaaagaggctcctgaatgaaagatctaaatgcgtcccggggaaggagcctgtgctctgtgacagacacaggagtgaggcgcacactgaaaactctcgccatagaccatttcctcagcatcccttacagagatcacaggtgggatttctaaagaccgggttagagtaaaagggaaataaaaataatcaaatttccaaagcaaaacaacctgaccggtctccacctcgattcattctttcccctttcggtggccttaggtgtgcctgacgctgaccgccaagcgcatggctcgcaagaactgcctggtgaagaacctggaggccgtggagacgctgggctccacgtccaccatctgctcagacaagacgggcaccctcacccagaaccgcatgacagtggcgcatttgtggtttgataagactgtgtatgaggccgacaccagtgaggagcaaaccacgggtaacaagtggccctggtagccaagagcggaggatttggggtgggaaggttaggcgatagatgacgccagataaacaggagagagcaggatcgtggacagaagcgggagtgtgggggccataggaaatatcacgccgggcggtggtggcacacgccttttttttttcttttcggaaaaccaaaaagaaagaaagagaggagaagagataccatctctgtgcagtgtttaggtgcgaagacgaaagtgaataacccctgctgcgcgccttatgtagctgagaatgagcttggccctcccagtccccctgactgacctccccctcaacgtctaaccccttgttttaaactccgtgtgtttatagctcttcctcttcttcttcttccctagggaaaacgtttcccaagtcctcagacacctggttttacctggctcgaatcgctggcctctgtaaccgggccgactttaaaccccatcaggagtctgttcccatagctaaggtatcaagttgaagtggaaagagggcacctcagtgactagtatcacctgtctgtccccttccagaaaagtctgcttttcagtggttttctacacatacccttccctccccgttctgcctctctgcttgtccggatggtatacccctgggacttactgtacactcccatccttgcagcgggcaacaacaggggatgcttccgagtcagctctcctcaaattcattgagcagtcttacaaccccgtgagcgaaatgaggcagaaaaaccccaaggtggcggagattccctttaactccaccaacaagtatcaggtacagaactgacaaaggtggcgggagaacggtgggggccatggactcgccagtggggggagctatgcctttgcctccagctttggagcagggcactcgttcaggagcgctggcatcccaactaacaggaaggctcaccacaaggaaagtgacaaacgctaaggagagagaagtaggtgatcaagggagagagtctgagcagaaggctcacccatgttgcctgcaaagagagcacgtcataaaatgctaagatgggcagaggcagctgaggcaggatactgggagtctcacacagctattagtctaaaccagtgtctgctatgaaattcgccagtgtagacagcttataccccccttccctccatgaagtccctagggcagccatcatgagacagttaggagtcgaatgcacgtgtgtcatatttttctctttttgtttgttttttgttgtttgttttgttttgttttgtttccgagactggtttcctttgcgtagccctggctgtcctggaactcacttccagggttatatttttcaccttcaaaaacattgattcattatccaggtaggcgagggagagagggtgagtgatggtcggggatacaaataaggaaatccaaagaagctatgcatggtggttcatataacctccacctattacctcagcagctgagagagggctgaggcagaaggattactctaaatttcaggtaaatttgacctatagtatgagagaccctgtcttaaaaaggaggaggaagaagaaaagaggaagaagaggatgaaaaggaggaaggaagaagaggaaggaggagaagaaggaataggaggaagatgaagaggaggaagaggaggagcagtaatagtccatgcctagggatgggggaggggatgagaatccaagctaacttcaaagaggatttcagtagaaagtagagtccccttgctgaggctggaggcagccttaagctagtttgctcaggcaatggttcctccaactccttgaatttccatgaagaccagacatttgagtgtaacagggttacgaaataagactcctaagtcagttttgcccttctgtcttcaggcataaacaaaataacagtctatatggatttttaaaacccaattacttgtactttctgatggagcactaagggctaagtagatccacacttcccatcgaaactcgccttagtcactgtgataaaaaagagctcccagagctgcaaagaagctgcaaactttattcctactttttttttcctgacacttggtggcctcactaaccagacaggaattctgtggcttggcagagtgtgagtaaggcctttggatgaattaggcacctctccctccatgtggttaaaaataaaagtcgaacatattcatgacattgttggaatgtctaacaaggaaccaagtcccccaccaaattaccatatgagtgcttctgagctactgaataccattcaagtggcagaactggtctctgtggtacacggtgtgtgacaagccagccccactggactcagctccagcaggcactagctctgacaggctttgagtgaactactataattagcttgctccaagggcagagactccagtctttgaaaggaatgtgtcttacttagcctgttagtctcttaccatctctgaaatagattgtagtctgagcatttctgatttctctttctctctccatcttcttcatatcttctttatataatctttattttgtgggaggtggggttcactgtgtagccctgtatgtcctggaactcactttgtagaccaggctagcctcaaactcagaacccatctgcctttgcttcctgagtgctgggattaaaggcatgcaccaccaccaccctgttctttatgtatttttaacaacaacatttttggggggacaggtatggtggtatattcctttaatcccaacactcaggagacagagccatgaggtcctctgtaagtttgaggccagcctggcctatagaataagttccaggccaggcaaggcttcatggtaagacccagccaaacaaacaaacacaacaacaacaacaaacccccacctatttctttttcctttctttcttttctctttttctttttgagacagtgcctctctacatagcctggaactcattactgaaaccaggctggccttgaactcacggagatccacttgtttctgcctcctgagtgctagaattaaaaacatgtaccaccaggcccagccaaaaccccctttttttggggggggggtatgtcatggattccacgcagctgtcaggggacaatctgtgagaccagtcaactccttccactgtcagtccagagaccaacttcaggtgttcaggtttggcctcaagcacctttatttgctgagccatcttgtaagcccccatctgtaatctttttttttagatttatttatttattttatgcgtacgagtacactgtggctgtcttcagacacaccagaagagagtgtggttgctaggaacccaggagctcaagaatggcagtcagtgcttttaacagatgagccatctccccagctccccctccccccatctgtaaccttgtatcaagatttttattccctgtgacctggttagtagagtgaggagctcttgtgctcccctgagcctttttgattcattcaacaaacactcattggtcactgagaatattgagctttgttaatcttaaacagcttcctccttaaacattgtttttcccttttaacgacttaagcatatcttgaacataactaggcattctttaacaaatcagctggaaccacattttacggtccagtagctcaccccattcaacatccaggaaatgcagtctggtctcctctgtgttcccacaattcctttctgtttgctgattctgcctccgacaggggtcatagcaggcagttcccataagtcaaaaaaaagaggaactctgtggggtgcagagagatccaagggaacggcaaacccaagccatctgattgctccctctgcttgctccagattcttctcatgaacctaccttgccttgccttctatcatcagacatctgaccagcacgcacacagcctctcagtgccatctcttgcctgtagaagaatggctacagggctaaattatttaaaattttgcttcagtttcaaagcttgagttttgtttttgttttgcaactcttgtaaaaacaaacaaacaaacaaacaaacaaacaaacgggactggagagatgattcagtgctaagaacactggctgctttcccaggggacctgggttcaattcccagcactcaaatgacagctcacaagagtgtgcaatccgagtgacctgacaccttcacacagacacctgcaggcaagataccaatgcacacagtaaaagtcaataaatcattaaaaacaaaaataaagtagccaagataagatatttttactctatagaatactctataggaactaaggtttcgcaagatcaggtggacttagctgagttcacaaagcagacaagacatggatgcgggctctagaacaatggaccttgagttcatgtgagccatccagtcaacaaggaggcagggagaaagagtacctggggtgccctcagagaacttctgagaggataagagattcctgtgcaaatgaaggggctgcccctcccctgcccccttgagtcttcactggcttggtggaaggtgggaggtgggtatgaaaccagtttccagtctcttaaccttcaaaccctccccaggattcttgccccctccgtcccatctggttctaccattacatctctccctagatgtccatccaccttctggaagataattccgaagcccacgtgctgctaatgaaaggcgccccagagaggatctttgatttttgctccagtttcctgctgaatgggcaggagtaccctatggatgaggaaatgaagacggacttccagaatgcctacatagaactgggaggtctgggcgaacgcgtgctgggtgaggagccagggagagggctttgaaaggacaccattagaatggctatttgtggggtgaacagcacagggtgttggggttgtgccgagggacacattgggtgacagctgaacccttcatctcttctgcagggttctgcttcttgaacttgcctagcaatttctctaaggggttccagtttaataccgatgagttaaattttcccatggaaaatctgtgtttcgcgggcctcatctccatgattgatcctcctcggacggccgtgcctgacgctgtgagcaagtgtcgaagcgcggggatcaaggtaaattcctgccctcccccaaagccctccactcctcacagcttgaaggaacaagtagaacgctcagtctagagtaggcgcccaatactcttggcctaattgattgctgcctccttgagcttacggtgtctgctcttcggagatgtcaaacagcctatcttgaattgagggttaaaatccccagggaagcttgaaaagtcagctgtctaaactatgctccagaccttgggatgactcttaggcatcagtacctcaaaagtttctggaaactctagtgagtttgaaaccactgtcaaacacagtgcttcgaccaatgtgtaaatgacctttctgtctccctgttcctgcctcccctcccctcccctcccctcccctcccctcccctcctctcctctcctctcctctcccctcccctcccccctccctcccgtcccctcccctcccctcccctcccctctcctctcctctcctctcctctcctctcctctcctgtcctctccccctctcccctctccttctctctcctctctaccctctcctccctctcctcatcttgattcagtagctgtagggcacctggagaacaagcccctatgccatgttaccgctgccctaccaaccatagggctgggctgggttgtggtactgcaaggctaaagcccctggagctggagccaggcaatagtgaggatgaggtacagagctgaggacctctccatgggtctgacttgcagtgcacagctgcaataacaggtataaacctctgacccccgagggaaagctagacacaaagagtaaaactccactatagagcagacccaggagtcaaagtctttgatgaggtgggccttgaacttcacgggaaagcaggcagcaatgggatttttccagttctgagattctgtgtattcaggtttctagatcaaagactcatacctgttttttatttttttaaatgttgaatgattgtgtgtgtgagtgtgtgtgtgtgtgtgtgtgtgtgtgtgtgtgtgtatgtaagtgtggatacacacatgccatgatgctcatgtgtagttcagagaataacttttggaaaccaattctttcattccaccttgtgggcttcaggatttgaactctcgggttgtcaggcttgctcagcaagtgctttttctgagccatctcactggcccaagattcacaacataacagattagatattgatactttctgctcataccttatattctggatcacctgcatctaagacttaggaagagctggctagagcaggggagttggagtctcttagaggggagtaggtgctctcagtgggagctgctcttatattagacctgttactgctggcaagttgtcctgaatagcgcttagttaaatgatggttcacgggagtggagactgaagaagtgatatgggaaattacaacatagcaaatgtttaatcaccaccttagaaaacctctgaggcagtgagttctttgtggagatgacattgttacagaacatctccatagaataatggatgctgtttccccaaagcgctggaagctcccatcccatatcttggaagaaggcagtcagccgtctgacttctctgagcttcgaggtagactgttgggagtgaggagtaacattgtgcatgtagtcagctgcagtaaagcttaaaattccagctagcccgtataaaagacacacaattcaggtattttatttacaagccgtaagccaggattgggcaggtttggagctaatcttacttatttcccagccatattatcccttcttacttgctgttattcctggccacgtgctcatagtccatctcctctcatggcggcctcctccatttccatctcctttcttccctgtattcaactttattcaaattcccttcctcttagcgcccaagcgtaccctcaaggacattacacttcctccggggaggtctgagtggccaccgttctccttccggagcttcacattccaaggagacagactggctgctcagagtagcttgagaccctatctcatggtagctctcatgagcttagcttttctttttctgttgaataaaagcaaaacaactctgccccacccccaactctgggtccttacactgactcgaagaagataactttccttagggcaaaatgcttttttggcaacagaaaaagcattatctttcaaattgaaattataaatatacctcatgtggataaatatacctatgttggcaatttatctcacctggggaatttgtggatctctttggcaagaagagccccagtgctcgccagcaggtagggaggcccaaagatgtcaaatgaatcaggatgccaccaccgcccgaggcatagccagctcctgatagtttgtgaggactctgagggctgactgtgagcgaggaggcctcagtgctttctgagctggccttgttctgagcccgtttatgggtttctctacaatgtgtacctcctcctggacgctcgctaacctgatgggaaagctggcagattccgttgagggatcgtgactcattctgtctccctggagggaagtataagacaggtgaacagcatcatctttcaaaatgtacaaaatgtaactgacacagaggagcttgttctgaagcaaacccttccagagtcaagcctcctgccctgccccaagtggtggtgacacacagctgatgactgtcacagactacagaataaaagaagtcatataattgttgcatggccccaaagccttttacaagggaatgataacaggactgagcaggtagccctatgcccatgactttgaaacaaatgtgattttttaaaaaattagaaaatactcccatcatatttatcagtaagatttcagtagaataaaaatacatgtcgcattataagcctggttccctctacaaagaaaccaagctttgaaagctgtcctagcgatatagctttcttactgacatttgaaagtttcagatggtctgatctgggagaaaagggtggacaggaacacaagactagttggtaccactctgtgagaacatgagaggtataggtggctccaacatatgggaaatcaaatccttccagaacttaatgaactccaaacgcagctgcatagcctttacctgaaagaagctattttttttttttgtagaattacacttctgtcatatgagtgcatctcttacacgcatatctgagtattttgtaacattgtgtctaaggagctcactcttgggagagttatcctagcattgttatttctctgagtgcatctcatccatgaatatccagtgttttgaaacattgtgtctacagagctcactcttggaagagttagcattgtatttttgcttctctggcttggcattggggtggtatggctgaagccactagacaacagtccctgtcatggtcagacatggtgagagactaggaatgcctgaggaagacacgcatgacttgagaagcaggtcctagaccaccattggtgagcccttgggaagtttgcattgtgttgtaccccagaatcatctcactaaggacccagtctcagccacaggtacaaggtagtcctcttacggttcctctctagttccccactatcaggcagccctagcctgagctcctggtgatccactgtcctgcagcaaggctgaacgatcactgtcagtaggttgggtaccagctcagtgcagttgcagcttagttagcatgctgtcgtcttccaccaagtcaagggtgctagggatgtggaatgatggagtttgtgagacttatagccgagttctttgagaaagaccactccagtgtgtatattcacaccttgaaagctaataggcctcttctgggtctttgaccctgaacgcagcgaaagctgttaccatcttcaggtgtctcactgatccctcctgtgagagcttaaaaaattgtatggatgcctggaggacatctgggaaccttgagaaaaggggctcccaggtagccatcttcccttcagtcctcatcccttaattatttgtggatggcttattaagtgcaggaccctgtagcggggcaaagtgcagccccctccccttctcaacattctcattccagtggggaagagatcacgacacaggcaagtgctaagtggtagcatgtgggaagaacgggatgctaaggaagctaagagcacaaggacctgatgtttgggtgggaagagaatacaatgagcttccagattgaaagtgcagggcaaggcaaggcaaggcaagaagcagagtaaggttctatatgcactgggccctgatgaagtttagctaggtgacatattattctaggcatcccttcgtaacgtttggaatgtgtttgtgttgttacttaaaagttgaaaacagcttctggaacaaagtgcaatggaattctgatttttgtaatacttccaaatgactggcttcttcctgggcaatctagaacctgaagcatctgtcgcatcgtctgacatccctgcctccaaggactaaataaacccttgatgtgaacgagttgtgatctactaaatgagctacgcttgggggaggggcataaagaatccagagcttatctaaaacattctccttttccttcctcctcccaattcaggtgatcatggtaacgggggatcatcccatcacagccaaagctattgccaaaagtgtgggtatcatttcagaaggtaacgacacggcggaggacattgccgctcggctgaatatccctatcagtcaagtcaataacaagtgagtccccgaaagaactcagacctgacacttgcacctccgtcctcagtctgtcctcccaaaaatcactttgtgaagttcctggttggggggggggggtgtctcctgcagcaagaaggattgtggggtttacactctaccaagttaaatataacagaaaagtaactaggtaattaggtcactgggctttcagagggaacaggaaaagatagagagccaaaggcaggagtggctgacaaagagggtcaaggatgggacgagtcaatctgaggacagcacacactgggaacaaggagagtgggtaggaaagaaaccagaacttaagagatcagtagagactgctggaacctgaggtgaggcctcagcgctttgatcgagcctttggaaactccttcccttaggtctgttaaagccattgtagtgcacggctcagaactgaaagacatggaatcccagcagctggacgacatcctcaagtcctataaggagattgtctttgcccggacctctcctcagcagaaactcatcattgtggaggggtgtcagcgactggtaagggagctaaggggccctggggagcctgactgagtccagccacaaagccagcaggggaacacatggaatggataggaaggtactggagggaatcccatcttgaactccgttgatcgccttcagtttgaaagctctctgaaggcttaaatagctcacaggaacagaagacagggctgagcacagttaaacacgactgcaagatgctgaaatcgagttgacctttgggactgatcctgaatctaacacacattttttttttcactcttgtctggatttcaccagggagccattgtggcagtgactggtgatggggtgaacgactcccccgcactgaagaaggctgacatcggcattgccatgggcatcacaggctctgatgtctctaaacaggcggctgacatgatccttctcgacgacaactttgcctccattgtgacaggcgtggaggagggtgaggaggagggtacctgatggctggatttggtcctttgagtggggcttagagtacgttaccttcattacctatggttaccgtccaacctcccaatcctgtacggaccgcaagaaattagaagacaaagccttgaacattccatcagcttgggctgaaggaacatgatttgtcgactactcatccagcaggtgtaaagccctaggcttaggtcccaacaccacatagaatacttattaccccagcgctcagatgatggaggcaggaaggtcagtcatccttggctacacagcaattctgaggcctgcctgtgtaaaatgggagaccttatattaaagaaagaaagaaagaaagaaagagagagagagagagagagagagagagagaaagaaaaagattcagctaatacttaagtgttctttttaaagacgaagttggagcgttgttcagatttgccagggagactgagaccctggcatacatcatatcttctttatgggcttgctaggattcccatgtacttacttcaatacagttttcagagtgaggtagccactgcctcgaaaactgaatgcttcagtcttcagcagggccccagagaaacttgtttgtctgaatgattcggacctgctaagaccaatcggaaattatctgcaaagtaactgcatgaactcaatcaccctctgtccagagaattccaaagagaatgccgactggaacagagccccatgaggctccccataaggctgcatgcttcggtcccttatttctgtctgaagctatcttactaaaacataccaatccactttattgtattctggtatgaatctgacagtttgcacattattttaaatctacttaattcaataaatttttctgagcgccatttgcaagatgactatacccaggacaggagacaaagacacaaattcctgcccctgaacaactttctttgtagtggggagagacagacaatgaacaaggcagatttcacagaaagttaaagcaatagggagagagagagagagagagagagagagagagagagatagttaagggaagaaatgacagcctgtgggagagtagccaaggctagacccagccatcttgcaaggcataagtgtcactcagagtagccaaggccagactcagccaccttgcaaggcaggagaagcagcactcagagggataagcaaggtcacaagttaaagcagaaaaataagattcaaaccaaagctccggttctttccattccatcttcatcttgcaaagactttaacactggtattttcagccacctccaggattaactctgcccaactctgcccaaatttcagagatcaggtaacactagccatggtgaatccaagaacaaaacgtacgaagtctgcccatggctaataaaccatggcttgacttgacaggcacaccgtttgcagagaaatcacaggcccccacccccatctccccacctccacccccaccccacccccactcccaaggtctacgacttcccagcattttcatggatcacccctttctagcaactcctcttcccaggagtcagtttgtcagaggtgtgtgtcctctggctgtttctcctctccaggccgcctcatctttgacaacctgaagaagtccatcgcatacaccctgaccagcaacatccctgagatcacccccttcctgctgttcatcatcttaagcatacccttgcctctgggcaccataaccattctctgcatcgacctgggcactgacatggtgagcgccaggtttctctttggggattcctacgatctgatccatcgagtgtaggaaaaaaaccatcctgtgacaggacagctctagagtgtcttctgaaccccgcatacctgtcattcccaccatccatcctccaggtccctgctatctccctggcttatgaatcacctgaaagtgacatcatgaaaaggcttccacggaaccccaaaacggacaatcttgtgaacaaccgtcttattggcatggcctatgggcagattggtgagcctagggaagtgcaggggtgaaggggtgatggagggtgacagtggctgtggctggccatttagacacctctgtttagaagtcagggggaacagtgtttcaaaaaagaaacgacttggctctgggaccacagagaaccgttgatctctgagctgcccgtacagaccagcagtaaaggggaaacctacataaagtgacagtgccccttcccatatgtgaagcaaggagtaaagagataacacgctacagtagctctgaagtccttctgacagctgtaggctctgtgcttatacacatacctcacacagacacatgattaaagttaaaaatgtttctaaaaagagtctatgatccaaagatgaccctggatggaccaaagcaagaccaaaatccagtgaggccaactctaaatcctatagctctatgattcgtgccagagggcttaaatagctctgctctgcaagcttaacatggttagaaacaaatgtcaggattttggaagcaagtctcagagatggcaagatcaggtcaccgatgacaaaaatcttcgtcactatgcaaagacacgctaaccagctatgatctgccttttgggaccattctctgaacagactctcctccctgacgactctgtctctcacagggatgatacaggctctggctggatttttcacctattttgtgatcctggcggagaatggttttaagcctcttgatcttctgggtatccgtctatactgggatgatacacaattaaatgacctagaggacagctatgggcagcagtgggtaagtgaaaaggggaggatctggttcggaactagtcagactgagggagtcacccaagtgtggtagtataatcccagcacttgggaagctatggtaggagtaccacaaatggaaggctcatctaggcaacatagtaaattcaaggttagcctaggctatatgctatgagactttgtctcaaaaaaatgtgtgttcaaatcttaggtgttgaaaaaagatactttttatatacactgtggcttcagccagttgaccaccatgaggcagtcagaagtccatgcttccatgctccaggagtcagcgatgcctagagttcttaccactcacagtaccaacacctccccaaagctcaactcaagctcttgttagttttacattctacatgtcttccccacagtcaaggtgtggcatgattctgatttatagtacaagaaatctatttaaaaataattttaagccaggccatggtggcgcacgcctttaatcccagcacttgggaggcagaggcaggcaggtttctgagtttcgaagacagcctggtctagaaagtgagttccaggacagccacagctgtacagagaaaccctgtctcgaaaaaccaataaataaataaataaataaataaataaattaattaattaattaattatacacaacaagaacttctcttagatactgaagacatataaagaattataagaatgggttgacaacagttgtttggcatctccaccatgttggggtcctgtgcaagtcgggcttcactttcatagcttcatacaatggcctctcagggcttttctgcatggactaccttgtcacatacctggcctcaggggctctctatatccacagaacattccacacacctttttctttccttcatggccttaaagccaacatcatgtgaatgacaacttgggacaaatcctgtcccccttgaatgccatttgcagcagcttctgtgactgctttttagaagcaggaaattccctaggccttttccttctgcagggtggatgcttggcttccttgcaaggtctcaccctgagggcacccctgcctctgtccggatgtaggtcaggtctctcctcaatctccttatgcctctcagctcaagccttggaggccaacattaaacttcctggtgattccttttctcctcaagccgtacattttctatttctctttttttcccacttgctctttttcattgttgacttacataagagtaattactaataattactaataaagtcaatattaggctatctcgaaatctcccctgcctaaggaattgttctgttacttttaaattcagttcttaggatgagggcagaaaacagccaccatctttgccaaaatatcacaggaacggactgtggtccaatggccttcttctctcagtccccttgacctgggcatccatgatccacataggttttgacccactactgtcttccaaacttctgctcaattggcccagtaagctctgcttgcagcattcagtcacattcctagtccaaagtgccaaagttttctttccttttgccttcacgaaaaccacatggtcaggtctaacacagcaatatcaacttctgtttcagtcatattatttctcttctttttcttttcttttttttcttgtatgtttattttatgtgtggttttgcttgtgtggcccacagaggtcagaagaggtcattggacctcctggaacggagttaagcatggctgtgaactgccacatgggttctgggaactgaactgcaagagcaacaactgctcctaaccactgagtcatctcttcagcccctcagtcatttttccattgatgtgataaaacaccatgaccaagaaaacttaaaataaaaaaaaaaaaagaaaagtttattctaggcttacagttctagagggttagagttcatgatggcagagctgtgagcttccccacccagaaagtgtactacttacagttttaaagtaatagttccttatcttaaaaaaaaaaaactttcattaatcctacttatcacaacctatattagaaactgacccaagaccttgggatatgacaggaaaccaaaatgatcaagtcatgagctccttcccatgtagaccaaggatggcctctaagtcgatacctacctcttgcttctgcctctcaagggctgggattaaaggtgtggtccaccacactcagcctataaaacatgggtcttatggagcttactctagttatgggagaaaagaggggtgtgtgtgtgtgtgtgtgtgtgtgtgtaacacatcaggttaacagattttaagtaagtccaagggagacctgaaaatattgaaattgagatactggagtgagatagaaggataaacatggaagacaaatatgcctgaaatttaaattgcagaaaatctctaggtattggaaagggtataggataatatctaatgcttggctgtgcaggcaagctgcctacgtagagttgtggaggagaacagaattagggggggataaaaaaactgggaagccatggcaatggaagattattcataaatatgaaatgtagatctcaaagagagagagagagagagagaggccaagagaagaagtaaagaaacagtgagccagacactaaagtctctaagcaatggcagggattggcacagatggtggtgcagagctggcgggcacacaaatatgctggctagccttggccttggttccatgtttgactcaacaagttttcccgtctgttttgtttgcttgtttgtctgagacaatgttttactaggcagagcagactagttttgaatgtagaggtccacctgcctctgcctcccagatgctgggatttcagttgcacaccaccttaaccttagttttctaatcattgaaggctttttctatccaaatacaacttgtgatacatcccaagtggttttacagttagtagcttaatagtgtgcaaacctacctactaatttcttattgcctatatttagaaacatgttgttttgttttagatgtggggtctttcctccagtttttcccccagggtaatttggatgcacctcctctgtgttcctacagcattcttggctcctctgctgtaacttatctattgcattggcattgttagcatagttatgcctcctaccagattctaagtcccttacacatacaatataaaggagagaaccaagagatgaatgagggagttctcctgggccttgaacgagctaggcaagcactctgcaactgagccgcagcctagggcttctgtctaccattcttctcagacatttctcccccccactttattcatattgccctctggttctcccttcctttctgacttaagacctctggactctgctggcctaagtccaccttcttttaatcatagtcctaatttattaagaacttactgaggtgtgctacataattcttaataggcaaagtatggtgaagggatccagagaactttgagtcaggtagggaaaatacacaaacactataagaaagacagctatgtgcacagagctagaggcatccagagaatgcaaggctcagactctgggtcctgaaagacaaaaaagacaaggaactcttggatgtatatctaaacttcttactgacccagatgccacttttttctcatcctacccccagacctatgagcagcggaaggtggtggaattcacatgccaaacggccttcttcatcagtatcgtgattgtgcagtgggctgacctcatcatctgcaagacacgcagaaattcactcttcaagcagggcatgaagtgtgtgtccacgtattgctaccaaatccctccctgccccctccccccacgcttgaacatgccctttactcgacttctcttcctgtctattgcacttatcactctgtcttcccagaaacaaaatcctaatatttggactccttgaggagacagtcctggcagctttcctgtcctacgttccaggcatggatgtgtccctgcggatgtacccactcaagtgagtaaagcgaaggggtcccagcccagattagtggagctaccctcagggacttgcgaggtcctttcacactcaaatacacggcctttatttatggcggtatcggagactatgtcaggagatcacaagctgctggacttgcatattcagcagacttagcagtgtttaattgagtggaattttatgacggcatctgaccaagctgggcaaggatacatgagtctcggtcctaatataatcatggcaatagtctaatttaccaggtagagtggcacatacctataatcctaggagacagaaacagaggcatcaggaattcaagggtattcttggtgacattgtacatttgaaggccaatctgagatagaaaccctgtctcaaaacaaagagccaaatttatagctagcttaactaattcttttgcatatatatatgcatgtatgtatgttttaatgtgaacatacgcacctgattattattccagaatccctctttctctctctgccaaactcctacctcctatttcctgcctcagctcatgggccaaaggcttttttttattgacaggtgagtgcttttacacagtacacaggagattctctctgcacatatgtgaggctctggggttgtgctccagcactggaaaaatttggaatctggcagtgttgaggattacagagaacttggttttaagcactgggcatatctgtctatggagaatcttttactgatagcatctatgctttcgtcgctgaagatgtcaataacaaatggaaatgagacgactgcactctgtaggcatcttggacacagcacttgtacctagtattattattctgtgtgcccattcagctcttctttctgatctctctgaactcttcaagataaaagagcagcatataaccatttttatttcccctgtatcttacacagatccagggtacacatataactgttgttcaatgaatggaaaagtatttgtatgttactggtgtgtatagtacattatatttgtggtgtgtgtagcaaatgaaccctggcctatgtctgtactgtccaatatggttgccgctctcgatgtgtgacaactgagctcttgattagtatgactaaagagcatgaaatgcatatttataattttaattttaactcagagttaaaaaataaagcaacaaccaggtagtggtggtgcacacttttaatcccagcactcaggaggcagaggcaggtggatctctgagtctgaggccatcctgttctacagaccctattttttaaaaaaatattttttaaaagaaatgaaaggaaagaaaggataagataattttactcttttagagatggtatttccttttagccatttgaaaatcacattataaaatgtggtgggatgcatgcctaggatcccagcacttgagagatggagccagaaagatcaggagcgtctagccctgcctgacatcacagcaagttcagggccagtctggatgctgagagcctgcagagatgggtggggaaacacttggtgactgagttaagacaggtaagcagaacaggacgccaccagatttccaaggtttagtattaaaagaagaattcaagctatctgagtagtcatgtttatgttggttagcattgggggtatatacctatatcacagcactgaaaggctgaggcaggaggatctcaggtttgagggcagattggcccatctggaaagactgtgctttaaaaccaaacagaacaaaatagtgcttatagtgattacacacatgttgaagtagtactttgatatattagttaagtacatttatatttttataattgatatattgatttaaataataaatatatatttaattatattgatatattagattaaattattaaaatttatttctcatgttccacttatcttaatatgggcattagagaacttagattttacatgtggtttgcattatatttttctctttttccatttttttctatgtgtgtgcatgtcggtgtgtgcatatgatgtgtgttcccatagaagggcaggtgcacatgtgttacagcacacatgagaaggtcagaggacaagggctggccttagcctttaccttccagcttgtttgagccaaaagtctcccttgttcacagctgtgtgtactaggctaactggtctacctgacactgtatcttctcctgcccctgcctcccatcccccgttgggggattacagaggcttgtgctagtgcgtctagcttttacacgaattctagggacccaaaaacaggtgatcaggcttgtgcagcaagcacctaacccactgaaccattatctccagccatctcccagcccttgcattgtatttccattgaactactgaacagtgctattgatttataccctgctctctatgacactcaagggtataaaactcgttaaatccatcttcctgtcccctcattatagaagaggcacaaagaggaaaaattcagtgtctattttgccatatggaagtacatgtaaacacacgtgagtaaatgtatcaattgccttcttcagcagtaagacttagagtatgcagagaaaagcaacaggaggaagagggggctctcagcaactcagtgtcagctggcaataaactacattaattctgcacatgacatttatcaaatggccactggcattgtagatatctgtcttgtgactttcctctctgcccccagtcgcttagcactagggctctgacctcctcaaacggaaaatcaactgtatctcagtttgcctccccatcttcaccacccagctcagtctccatggttcctccgcaccgttgctgctcacccttctctggctcgtgcctcttgagccacactgaccgactcttgctctctgcaggataaactggtggttctgcgcacttccctacagtgttctcatcttcgtctatgatgaaatcagaaaacttatcatccggagacggcctggtggtaaggctacctaccctggatcctgccctcgagtggtcgctggccctctcatgagctttcccatcccatcggctccctccacagccactgactttctctacctcactgtctgtcctttgctcttcccggaccctggtcctctactcctgacctcacgtgttcctcccagtgcttggggccctgctgcacatgacagcctctccacttgcttcttgtctgcatagctcttctgctgtccttctctctgctcacttggtctcttttccacaggatggctggagaaggagacgtactactaactgcctcagagaaagatcttcacacgacattggtctcacgagagccaggactgagtataacaatgacacctgagatagagctgagcaggggcccctgttgtatgggttgaattgactctggatgagagagacacattcctggggctggagaaagagtctctggtaggagatggaataggttgggagaaagaaagcccagcctgttctgcctggggtccagcgagtatgtgcagtcttgttacatccagcagcctgtctagagataaatgcttggaacaaccctcaggttacttggtgtgcagaagtctgttttggagggaacagagttcagcgaagctcccttcctacacatacattgtaattagtcaaagggacctcagggacctcagaagagactaaaaatgtactagaatccagcatctggggctaggtgtgggggcccacagtcttaatatgccagcatttggaagacagggacaggtgaatcgctgtgaatttgaggctagcctgtctacctggtgagttccaagccaggcagggctacattgtgagaccctggctttaaaaacagaaaatcaggcatatttaaccctgaagggtatttcctattttaagatcgatctgtgatgtcctgtcagtgtaagggacaaatagctgccctcaaagtctagctagaaacagatactgcaagggagaaaagagcagctgagctacatattgttaggggtaccacggcactcatatctgtacccatgcttggggcttgtggggctaaataatctagatcctgacttgcattttctcagaccagactacaggccatagcattgttctaaaggatacctaatagcatcaggtctagcaaagctcactgactggggaatggcagggtggggtagggtggtagggttccctcctcttcatgtatatggggcagactgtgattcctgccctttaaccctgtcattgacatctctacgctagctatcccatcctttagccttttctctctggtacagcctcaaagcaggttacacgcaaatactaggcaaataatgtatcactgagctacatcctgagcctgggacccaagctctttattggtctggtcttagtaaaaaagaacaagaagccacccccccaccccacccctgcccaccttcctctctagattcttcttcccttgtcttgccccctctccaactcatttctgctcattgagcctctctgctttgcctgtgactctcgttcacttcaggaactttttagagatatccggccaaatgatacagaggaatgctgaggaaaaccaggggaaaccggggaaaaccagcagctgttaccaaaatgccacctccccgcccccacccttctcccccccccccgggggggggggcaactgcacactttctggctttgggccaaggaccaaacccaccatcagttcttaggaccatattccctccattgcacagtagttcctagaggaaaccaggggcccccatcccagaatgtgtatccttaaccacttttcaaacttgtcttatagtggtaactcggacccaacacagttacaaacaaggctaaataaaataataaataagtgggatactggtagaggactgtggctggcagacacaacaaacaaagaggaaacaaaacaagaaaccctcccactggaaggtgtagccagcccctctttctctatgtcaggcccctttctcagagctttccttccactccccccgcttctagtgcaaggtctcctggggacagagctagatcagtgtggggtccacctcggctgctgacagggctgaaacagaccctggaagatggaagcaggggtggggaggtgtgtgagtgagatggggagggggagggggagggaccagctcctcaagtttcagtagtgaggagctttgagtgtctggtgggttaaaaatacagacgccccaactcagggtcatttgatacggggagctgaggcgtgttagatccagaggcctgcactcaggcagcctggaaggaagggggctgaggagaaagaagaaaggaaagcatgagagaggaggcctagagtagtagtgtgggagctgaagagagtaagggtggaagtggggccgtaaagggccagaagaacggagtggtggctgcacagacaaggaggcgctgaagcagtcagggtcaccacagagtcctgtctggctcctaaggttcagttcacagtggaagaggtctggtgtgccagtgtccgttcagatagctccctctccccagaaccctgaagaaatgagacaccatggctggatcatctactgagcaggcctgcccgtcactcctgggtggcctctgcagccacgggtgtaagctctgcctggcacatcagtcactctcctgggagatgaagagacaggattctgagatctcctcagctccagtgccatgcttgggctacctctggcctctcccgctacagtgtcagctgtccctcttggatccactcctgacatgttcttaagaatgctaaattagctatataaggtctgccccatgggaatgcaagatgctattctgctagcataactttatacttcttcctagatgcgaattaaacgccatccttctagaatgagaagtacgttgcactgtggacatggaagtctgactttattgtgatctcccccttgagccctcttgagcctcagtttacctaaatatagtatgagccctagaaggccatgcaggagtccttgctaagtactcaaagcttaattcaactcttcacctctaagctaggaccctaaaaatgacagccttcgtacctccagctcagctgtgtgcctcagatgcacagaattaatccacagcgtccgataagggcacagggtccacctcttcctgtttacctcgagttaactttttcccatacttataccggatcatctgtccttgtcaaagacataggaatgaatagtagctattagctctctatagacctgtgcagtctgaggaatcctcccagccccttatgccctagaatcagagtcccacgggatcaggccagagccctcagaggaggaagcgccacgaagcagtgggcagtacaggcagagaaagcccaagtcgccatcactacaggatggaactcgggccagccctgtccttccccctgcattcctgagttgggactgttgagtgaagcaaaggaaactgactggagctaagccaggattctggtcttggactccgctccatcttttattcagagaatgatctcatccttggtccacggtctttaaagggaactgcacgggggtttctttcctggagcctggaatgcgcttttattgctcacgtctcgtccataagatcaaagaaataggctttacctatagaagactgctggattttaggagttagaaataccacattctctcctgtattatcagtttagcctctggcccagaaggtgtcgtccttgctacctgtacttctttctgataggccttgtcctactctgggatccctggataccctacatcccccctcctccagccccagcctcacttacccctaactcatctggtcttatttttagatccggcatctctctctctccctttcttaatatggcgatgagctcttaggcctgcatggggccaggggctaaggagtcctggacactgggggagggggaaggaaccagctgctgggagggagcctagggaagaggtataggaggtgagaggattcaggctctcatggagctgtcctggcctcagaaggttatccatccctcctgccaaccacagagacatatttagacaggaccaggtggggacggagggggtgccagtttcaaggggcagctccggttccctccccgcccctgctcctattcctcctcctgaccctttttctcttggctctgtcggcagtttctccaggacccagcagtgtcctctgtccactgctctggcccactctctaccccacccccacctggagcccctaactcaggattctgtatccaaggggcacctctccctatttcagctaacctcctctggaccaggagagcaggcccagattgtactacctccatgagagctaccgacaggatgggggccagagcagtgtccgagctgcggctggcactgctgtttgtactggtgctagggacgcccaggttaggggtccagggggaagatgggttggacttccctgagtacgacggtgtggaccgtgtgatcaatgtgaacgccaagaactacaagaacgtgtttaagaagtatgaggtgctggccctcctctaccatgagccccccgaggacgacaaggcctcgcagagacaatttgagatggaggagctaatcctggaggtgagtggaggatagcaggcctggagagcatgctcagtcccctcggtgagccctgagtctgagggtgggggctagcttaagagcagcatggctgctgggcctctgtctccaccaagtacatgactggaatgtggccttggcaaaaagaaaaagactcagggaccaaggtcctacccttctgttggtaagttgtgctgcaggaggcaggggcactaggtttggctggggggggggagaagctgggtggggggagcttgcacagtaccctgcactgtgcttcatactactcttgtggccaaaagatccccctctctttacacacgtagggccgtgctccaggacgcaaacagcagaaccgtgaacacgattgttcttttatttgccttcaactgacttagtgactgtacagttaaatgacttctagaggcttcccacagacctccccaggccaacccgccgcgttttgtcccctaggggaagtccttactagaaaactctcacgaaggcttcagcatgccttccccatcatttcagccagagaatctactttaggtccaaggcagagacggttaatacaaaaaagaaatgaggggaggcagccttccgattggattacgtggccacacgcatccctaatggagctaggatacgtttgcctttgtctgcacttccccggcttggtgatacagagaggctccaccttgtccgagcttggaatgtttcagtgtaagacacccggccccctggcttgcatttccgtgtgccccatcgggctctgcaaaccgctatctgattaatgagccaagtatttttatcctccgtgttcagtggcctctgccatccacctgccacccgccctcccattctcctaaggatcactgcagtgctgggtgggatacagctgcacacagtatgcccacagcagaaagaatccgcaggtggctggctggggaggcttgtggggcgaccagcctaaagaagaaggaggtggggcctggaagaagagtgactgtccctccagggatgatggcgacctcttgacctctggcctttcctacccctcaccccacaccccatcctccacagctctcactttgggagttacttcaggatcccagggtcccacattcccctctgctgagtttggcctttgatcaggatgaaaggtagggcccagtctttcatggaaggtgagactcagcgtccctcaggaacgttgcagtgagcaataaatacacaccatcttttcaaaggctgaaccaaagacaggctagggttatgaggtgcccaggcagagtctgcttctaacagatggtgaaggtcaatgtttggctttcttgcacctcagatgacccgatgaatgataggaacgtatctcacaaggaagaggttgataagaattctgggggctaatttaattctgactccttcttccagttagcagcccaagtcttagaagacaagggtgttggctttggcctggtggactcagagaaggatgcagctgtggccaagaaactaggtaagggagggcaaggaagcaggttatggaagactggagaggcccaggtgggggtttgggggagatttgagagctgcacatctatttagagtgggccggggcatttgagattaggggctattctgtatagagtcctgcgccccactccctggatgaggtggaacggtggggtggtaacctttctgctcatctagaaaataagactgggtagggacatgggcatggtggctcatacttgtgatacttgtatttgagaggatgaggcaggaggattgtggattcaaagcttcctgggctacatagtgaaattctaaaacaaaacaaaacaaaagcatgtatgctaacctaaaaaaaaaaatgtagttaaaaaaaaaaaaaaaaaaaagaacacagctaggtgttggaaaggaaggtgaaaccaagaaatacaggcatagccagagagcccttctgcaaagtgcttttttggctcctcccctcccccctcccttctcccttccccctcggcttcctccctttctcttagcagagcccagatattacaccacccggccaccaggcggcagcacaggctggacaccggatgtggatgggggaagggtagttagcaacaagtcatctggacagcaatagcaaagagtcagccactagatacttcagagtcgctggcaggaatatttgtccctggctgtgtaggcagagcaagggagctgtgttgctagaatctgaatcttcccagtttcctcccctcaaaccctaccgatccccacccgggcaggccccagcttctgcctagctttagctcctgaactaatttgggaatgaagggtttaagggtttgttgaaggtagatggggcggggcaggagtagggggaagggatggagaggtggaggatgagtctgcagggattaacaagtgggctgtgaccaggttagactcgggtttctgggaaggttgtcttcctcactcaccttcccaccatgcgtttcctaggactaactgaagaagacagcgtttatgtgttcaaaggagatgaagtcattgaatatgacggcgagttttctgcagacactctggtggagtttctgcttgatgtgagggttcccctgagcctcatagccttgaagtttccaatgcccctcggtccttactaatcaaccctacactcctaaacacacacacacacacacacacacacacacacacacacacacacacactcacacaccaggcatacatacactataccagtttcccacataccacgtgcaacatgtaacagatatcacatacatatatcatatagatcagacacaatgtacacaaaacatatgcatatcacatatataggcccctatatatatgtgtgtgtgtgtgtgtatatacacatatatatacatatatatatgtgtgtgtgtgtgtataaagcacatcatatatatgtgccacatataccagatataaaacatacatacaatgcattctcatgcacacacatgacatacagcatacatatagcaataaaacatgtaatatacaatttatattatatatatatgtgtgtatatatatgtgtgtgtatatatatatatatatatatataccatacacatcagaaccacaaataaatcacacatacaacacatatcacaaacatataccccatgccaagcagaagatacagaacatgcgtatcacacacactgcacaacactcagactacacacatacaccattaacaggccacatatccaccctatacaagcatctcctattctagttccctgtctttcccctgtatctttctctggggcctgtcagggacaaaaggaatggtggtctcaatattctttttctcccaggtcctagaagaccctgtagagttgattgaaggtgaacgagagctgcaggcatttgagaatattgaagatgaaatcaaactcattggctacttcaagagcaaagactcagagcgtgggtaacagctctttctgacccacctatcctccttgcctccctactttggccagtggccaagcatctctggttctgacctcctaggcccccttcttccttctgcacggtcagctccatcatctgtccctgcactctggggcattcccaaacacccccagcattccgctgcttcctctacaattctattgtattttattctcagagagctagagttagagagctaaaggggatgggtctcttcctgggacccacatgtcaaggaagacctgcagagaagattccccttggtggtgggggggagtgattctttggcagaccctgaacatgactgtgactgtcccttcctccccctcagattacaaagcctacgaggacgcagctgaagagttccatccctacatccctttcttcgctaccttcgacagcaaggttctcttccctgtggctacactggctctccctacactcttaagcttccctcagcctaccctaccaaaattgatgggatcttggcaccatttttcatgctggtattccccaccccagactcatgttccttctcctatagaattgaagggaaggtggacattagactgtctaacccacctttattgtgttaaacgatgcccagaggagtgaagacacttacccagtgacccagagccacattttctgactccttttctgcaactagttcctttacactgtttctcactcagctcccgcttctcctgctccataactcttgtctacttcctcaaaggtggcaaagaagctgactctgaagttgaatgagattgatttctacgaggccttcatggaagagcctatgaccatcccagacaagcccaacagtgaagaggagattgtcagcttcgtggaggagcacaggaggtggggattggccaaggttcctcccagggctagcacatcagtttgtgaagtgggctgggaagcaagccaacctggaagctacactgccctggagatgaatatgcttgcagacgttggtgttcactgatataccagtaggttctgtgttgtatttcataccccagcactaagctctgagccctacacagagaaagtcctctgtaaatgtgtgtggactgaggggctgcttagggagtgtcagccaatgagtagagtacctgtgttcggaccaggaactgggaggtaccttctctctattactgaagttaatttctttagcatcctcagtgaaagtggctccagggggaagaatcagaactgggattcaagcttgaactcagtcccttctcctttgtcattcttgacacttagcagttgtcaatggaggcacagggagcggcctgcggggcaagggtttttgccttccagtggctgttaggcaaggtttccaggacatttttggctgtgaggagtgctgctggtattcagtaattagaggccagagatattattaaccatcctccagtgcgcacgacgccccctccctcgatgtctgcagtgctgatgcgaagaaaccctgccctatactcacacaagtctcttccttcatgtgactccacaactagaaatacccactcatcagtctaaatactacttactctcgcccactagattttggcctctttcactggggcacaacataccaacatggtttaaccaatacctaactcagtcctcataacctatacccgcccccaaccctttcctgtactgggaagggaacccagggcctggcatacaggaggcatggaattttatttcgagcccaggctgtcagctttactaaatgagtgaatgaaaaagtaaatgactctgctgatatccagttcttacctttgcccccagcgtctctcttccagccatccccttcccactaaccattgttttgcagccgtgccatgttctgggcctgatgcccagagcttagatttgctaactggctttgttctgggctacaagctgtttatgccctaggcctgacccagaggtggcttcagctgtggggaccttctggagggaggtgtccccacccactgaatagggaccctctgtctctcctagatcaaccctgaggaaactgaagcctgagagtatgtacgagacttgggtgagtgatgaccaggaccaggcccttggggagcaggagtgggtaaagacccggatcttagaaacggctgtccctgctcctccctgtgcccttagctaggaagaaagccgtgtctcagccaaggggcacgtgggttggtttttatttgttttgtttctgtaccgaagaccatgtcaggtctcaagtgacaggcatgacaatgaacatgacaaggctgactcaaactctggagctgacaggatccctagagcagaaaggatgccattagaaaagtcaccaccgtgaaaacata

SEQ ID NO: 806 - DNA, 6542 bp, Mus musculus
tgtctctgtctgtctgccagggtctccagctgccccagacaggcggtgtggtcttgggatcctcctggtgacctttccagcctaggtcccctcagccactctgccccaagatgggtcgtggggcagggcgtgagtactcgcctgctgccaccactgcggaaaatgggggtggcaagaagaaacagaaagagaaggagctcgatgagctgaagaaggaggttgccatggatgaccacaagctgtccttggatgagctgggccgaaaataccaagtggatctgtctaagggcctcaccaatcagcgagctcaggacattctggctagagatggacccaacgcccttactccgccccccacaactcctgagtgggtcaagttctgtcgtcagctttttgggggcttctctatcctgctgtggattggggcactcctctgcttcttagcctatggtatcctggccgctatggaggacgaaccatccaacgataatttatatctaggtatcgtgctagcggctgtagttatcgtcaccggctgcttctcctactaccaggaagccaagagctccaagatcatggactccttcaagaacatggtgcctcagcaagctctggtcatccgagaaggagaaaagatgcagatcaatgcagaggaggtggtggtgggagacctggtggaggtgaagggtggagaccgtgtccctgctgacctccggatcatctcttcccacggttgcaaggtggataactcatccctaacaggggagtcggagccccagacccgttctcctgagttcacccacgagaaccccttggagacgcgcaatatctgtttcttctctaccaactgcgtggaaggcactgccaggggcattgtgattgccacaggtgaccggacagtgatgggccgcatagccactcttgcctctggcctagaggtgggacagacacccatagccatggagatcgagcatttcatccagctgatcacaggggtggctgtgttcctgggggtctccttcttcgttctgtccctcatcctgggctacagctggctggaggcagtcatcttcctcatcggcatcatcgtagccaatgtgcccgaagggttgttggccaccgtgactgtgtgcctgacgctgacagccaagcgcatggctcgcaaaaactgcctggtgaagaacctggaggccgtggagacgctgggctccacgtccaccatctgctcagacaagacgggcaccctcacccagaaccgcatgacagtggctcacatgtggtttgacaaccagatccatgaggctgacaccacagaggaccagtctggggccacttttgacaaacggtcccccacatggacagccctgtctcggatcgctggtctctgcaatcgtgctgtcttcaaggctggacaagagaacatctccgtgtctaagcgggacacagctggagatgcttctgagtcagctctgctcaagtgcattgagctgtcctgtggctcagtgaggaagatgagggacaggaaccctaaggtggcagaaatccccttcaactccaccaacaaatatcagctctccatccacgagagggaagacagtccccagagccatgtgctggtgatgaaaggcgccccagagcgcatcctggaccgatgctccaccatcctggtacagggcaaggagatccctcttgacaaggagatgcaagatgcttttcaaaacgcctacatggagctgggaggacttggggaacgagtgctgggcttctgtcagctgaacctgccttctggaaagtttcctcggggcttcaaatttgatacagatgagctgaactttcccacagagaagctctgttttgtggggctcatgtctatgattgatccccccagagcagccgtgccggatgccgtgggcaagtgccgaagcgcgggcatcaaggtgatcatggtgaccggggatcaccccatcacagctaaggccattgccaaaggtgtgggcattatatcagagggtaacgagactgtggaagacattgcagccaggctcaacattcctgtgagtcaagtcaatcccagagaagccaaggcgtgtgtagtgcacggctcagacctgaaggacatgacgtcagagcagctggatgagatcctcagggaccacacggagattgtctttgcccggacctcccctcagcagaagcttatcattgtggaagggtgtcagaggcagggagccattgtggcagtgactggtgacggggtgaacgactcccccgcgctgaagaaggctgacattggcattgccatgggcatctccggctccgatgtctctaagcaggcggctgacatgatccttctcgacgacaactttgcctccattgtgacaggcgtggaggagggccgtctgatctttgacaacttgaagaagtccatcgcgtacaccctgaccagcaacatccctgagatcacccccttcctgctgttcatcattgccaacatcccccttccactgggcactgtgaccatcctctgcatcgacctggggacagatatggttcctgctatctcattagcatacgaagcagctgagagtgacatcatgaagaggcagccacgaaactcccagacagacaagctggtgaacgagaggcttatcagcatggcttacggacagattggcatgatccaggctctgggtggcttcttcacctactttgtgatactggcagagaatgggtttctaccatcgcggctgctagggatccgcctggactgggatgatcggactaccaacgacctggaggacagctatggacaagagtggacctacgagcagcggaaggtggtggagttcacatgccacacggccttcttcgccagcatcgtggttgtgcagtgggctgacctcatcatctgcaagacccgtcgcaactcagtgttccagcagggcatgaagaacaagatcctgatttttgggctgctagaagagacggctttggctgcctttctgtcttactgcccgggcatgggggttgccctccggatgtacccactcaaggtcacgtggtggttctgtgcctttccctacagtctcctcatcttcatctatgatgaagttcggaagctcatcctacggcggtaccctggggctatacctagagatcatattatggagcctggaaaagaaaaggaggtagaggcccctggtgagctgaatcagaaaccaagacccagcaccaggtcctcaactacaaatagacagccgaaaatgaaaagaaggaagaaagatttagaagagctgaagaaggaagtggttatggatgatcacaagctaacgttggatgagctgagcgccaagtactctgtggacttgaccaagggtcttagtgtcctagaagcccaggatattctgtttcaaaatggaccgaatgtactaactcctcctccaaccactccagagtgggtcaaattctgtagacaactgtttggtggcttctccctcctactgtggactggtgcctgtctctgcttcctggcctatggcatacatgtaaattattacaaagaaaacgccaacaaagataatctgtacctggggattgtactatctgccgtggtcatcattaccggctgcttctcatattaccaggaggccaagagctccaagatcatggagtcttttaagaacatggtgcctcagcaagctctggtgattcgagatggagagaaaatgcaaatcaatgtaagagatgtggttttgggagacctagtagaggtgaagggaggagaccaaatccctgctgatatcagggttatctcggcgcaaggatgcaaggtagacaattcctccttgactggggagtcagaaccacagtctcgctgccctgattgcactcatgagaaccctctggagacacggaatatcatcttcttctccactaactgtgtagaaggaacagctcggggtattgtgattgctacaggagactacacagtaatgggccggattgcttccctgacatcaggcttgcaaatgggcaagaccccgattgccaccgaaatcgaacacttcatccatttgatcacagctgtcgcggtcttcctcggtgtttcatttttttggctctcgattatcttgggttacacctggctggatgctgtcattttccttattggtatcattgtggccaatgtgccggaagggctgctggccactgtcactgtgtgcctgacgctgaccgccaagcgcatggctcgcaagaactgcctggtgaagaacctggaggccgtggagacgctgggctccacgtccaccatctgctcagacaagacgggcaccctcacccagaaccgcatgacagtggcgcatttgtggtttgataagactgtgtatgaggccgacaccagtgaggagcaaaccacggggaaaacgtttcccaagtcctcagacacctggttttacctggctcgaatcgctggcctctgtaaccgggccgactttaaaccccatcaggagtctgttcccatagctaagcgggcaacaacaggggatgcttccgagtcagctctcctcaaattcattgagcagtcttacaaccccgtgagcgaaatgaggcagaaaaaccccaaggtggcggagattccctttaactccaccaacaagtatcagatgtccatccaccttctggaagataattccgaagcccacgtgctgctaatgaaaggcgccccagagaggatctttgatttttgctccagtttcctgctgaatgggcaggagtaccctatggatgaggaaatgaagacggacttccagaatgcctacatagaactgggaggtctgggcgaacgcgtgctggggttctgcttcttgaacttgcctagcaatttctctaaggggttccagtttaataccgatgagttaaattttcccatggaaaatctgtgtttcgcgggcctcatctccatgattgatcctcctcggacggccgtgcctgacgctgtgagcaagtgtcgaagcgcggggatcaaggtgatcatggtaacgggggatcatcccatcacagccaaagctattgccaaaagtgtgggtatcatttcagaaggtaacgacacggcggaggacattgccgctcggctgaatatccctatcagtcaagtcaataacaagtctgttaaagccattgtagtgcacggctcagaactgaaagacatggaatcccagcagctggacgacatcctcaagtcctataaggagattgtctttgcccggacctctcctcagcagaaactcatcattgtggaggggtgtcagcgactgggagccattgtggcagtgactggtgatggggtgaacgactcccccgcactgaagaaggctgacatcggcattgccatgggcatcacaggctctgatgtctctaaacaggcggctgacatgatccttctcgacgacaactttgcctccattgtgacaggcgtggaggagggccgcctcatctttgacaacctgaagaagtccatcgcatacaccctgaccagcaacatccctgagatcacccccttcctgctgttcatcatcttaagcatacccttgcctctgggcaccataaccattctctgcatcgacctgggcactgacatggtccctgctatctccctggcttatgaatcacctgaaagtgacatcatgaaaaggcttccacggaaccccaaaacggacaatcttgtgaacaaccgtcttattggcatggcctatgggcagattgggatgatacaggctctggctggatttttcacctattttgtgatcctggcggagaatggttttaagcctcttgatcttctgggtatccgtctatactgggatgatacacaattaaatgacctagaggacagctatgggcagcagtggacctatgagcagcggaaggtggtggaattcacatgccaaacggccttcttcatcagtatcgtgattgtgcagtgggctgacctcatcatctgcaagacacgcagaaattcactcttcaagcagggcatgaaaaacaaaatcctaatatttggactccttgaggagacagtcctggcagctttcctgtcctacgttccaggcatggatgtgtccctgcggatgtacccactcaagataaactggtggttctgcgcacttccctacagtgttctcatcttcgtctatgatgaaatcagaaaacttatcatccggagacggcctggtggatggctggagaaggagacgtactactaactgcctcagagaaagatcttcacacgacattggtctcacgagagccaggactgagtataacaatgacacctgagatagagctgagcaggggcccctgttgtatgggttgaattgactctggatgagagagacacattcctggggctggagaaagagtctctggtaggagatggaataggttgggagaaagaaagcccagcctgttctgcctggggtccagcgagtatgtgcagtcttgttacatccagcagcctgtctagagataaatgcttggaacaa

SEQ ID NO: 807 - protein, 2053 aa, Mus musculus
PFQPRSPQPLCPKMGRGAGREYSPAATTAENGGGKKKQKEKELDELKKEVAMDDHKLSLDELGRKYQVDLSKGLTNQRAQDILARDGPNALTPPPTTPEWVKFCRQLFGGFSILLWIGALLCFLAYGILAAMEDEPSNDNLYLGIVLAAVVIVTGCFSYYQEAKSSKIMDSFKNMVPQQALVIREGEKMQINAEEVVVGDLVEVKGGDRVPADLRIISSHGCKVDNSSLTGESEPQTRSPEFTHENPLETRNICFFSTNCVEGTRIVIATGDRTVMGRIATLASGLEVGQTPIAMEIEHFIQLITGVAVFLGVSFFVLSLILGYSWLEAVIFLIGIIVANVPEGLLATVTVCLTLTAKRMARKNCLVKNLEAVETLGSTSTICSDKTGTLTQNRMTVAHMWFDNQIHEADTTEDQSGATFDKRSPTWTALSRIAGLCNRAVFKAGQENISVSKRDTAGDASESALLKCIELSCGSVRKMRDRNPKVAEIPFNSTNKYQLSIHEREDSPQSHVLVMKGAPERILDRCSTILVQGKEIPLDKEMQDAFQNAYMELGGLGERVLGFCQLNLPSGKFPRGFKFDTDELNFPTEKLCFVGLMSMIDPPRAAVPDAVGKCRSAGIKVIMVTGDHPITAKAIAKGVGIISEGNETVEDIAARLNIPVSQVNPREAKACVVHGSDLKDMTSEQLDEILRDHTEIVFARTSPQQKLIIVEGCQRQGAIVAVTGDGVNDSPALKKADIGIAMGISGSDVSKQAADMILLDDNFASIVTGVEEGRLIFDNLKKSIAYTLTSNIPEITPFLLFIIANIPLPLGTVTILCIDLGTDMVPAISLAYEAAESDIMKRQPRNSQTDKLVNERLISMAYGQIGMIQALGGFFTYFVILAENGFLPSRLLGIRLDWDDRTTNDLEDSYGQEWTYEQRKVVEFTCHTAFFASIVVVQWADLIICKTRRNSVFQQGMKNKILIFGLLEETAAFLSYCPGMGVRMYPLKVTWWFCAFPYSLLIFIYDEVRKLILRRYPGAIPRDHIMEPGKEKEVEAPGELNQKPRPSTRSSTTNRQPKMKRRKKDLEELKKEVVMDDHKLTLDELSAKYSVDLTKGLSVLEAQDILFQNGPNVLTPPPTTPEWVKFCRQLFGGFSLLLWTGACLCFLAYGIHVNYYKENANKDNLYLGIVLSAVVIITGCFSYYQEAKSSKIMESFKNMVPQQALVIRDGEKMQINVRDVVLGDLVEVKGGDQIPADIRVISAQGCKVDNSSLTGESEPQSRCPDCTHENPLETRNIIFFSTNCVEGTRIVIATGDYTVMGRIASLTSGLQMGKTPIATEIEHFIHLITAVAVFLGVSFFWLSIILGYTWLDAVIFLIGIIVANVPEGLLATVTVCLTLTAKRMARKNCLVKNLEAVETLGSTSTICSDKTGTLTQNRMTVAHLWFDKTVYEADTSEEQTTGKTFPKSSDTWFYLARIAGLCNRADFKPHQESVPIAKRATTGDASESALLKFIEQSYNPVSEMRQKNPKVAEIPFNSTNKYQMSIHLLEDNSEAHVLLMKGAPERIFDFCSSFLLNGQEYPMDEEMKTDFQNAYIELGGLGERVLGFCFLNLPSNFSKGFQFNTDELNFPMENLCFAGLISMIDPPRTAVPDAVSKCRSAGIKVIMVTGDHPITAKAIAKSVGIISEGNDTAEDIAARLNIPISQVNNKSVKAIVVHGSELKDMESQQLDDILKSYKEIVFARTSPQQKLIIVEGCQRLGAIVAVTGDGVNDSPALKKADIGIAMGITGSDVSKQAADMILLDDNFASIVTGVEEGRLIFDNLKKSIAYTLTSNIPEITPFLLFIILSIPLPLGTITILCIDLGTDMVPAISLAYESPESDIMKRLPRNPKTDNLVNNRLIGMAYGQIGMIQAGFFTYFVILAENGFKPLDLLGIRLYWDDTQLNDLEDSYGQQWTYEQRKVVEFTCQTAFFISIVIVQWADLIICKTRRNSLFKQGMKNKILIFGLLEETVLAAFLSYVPGMDVSLRMYPLKINWWFCALPYSVLIFVYDEIRKLIIRRRPGGWLEKETYY

SEQ ID NO: 808 - DNA, 47903 bp, Homo sapiens
tctgtgttttcaattaagtaaaaagcttgggggctgggatttcagaagcagacagcacagacctgaatttgccagctgtgtagcctgaatcccgttactcactttctctagcctcagtgtcatcatctgtaaagtgagaattactagagtaccgatctcattattttttaaggattgttgtgaagatgaaatgaaaacatgtgtgtcatggtgccccattatgatcaaagctagggcccacaggcgcagtgggaccagtggcaaaggagaggagacttctaaatgggtctctactgttcactgcttcctccatctgctgtctcagtttacccagtcttctttccccttccatctcccacaatccccttgggagaggataacctacgccctgcctcagcttcctcaccacactcctcaacgcttcacaggtttatttccaaactcaacctgacatggaaatggttttcccaaaggacacaccagtgacctctgagttgacaaaaaaaaaagtgaccagctttcctttccccctggcatctgaaatctgaaactgttagttttttgccccttaaaacttgttcctctctcagcttcctggcccctctactcggcctaattctccatctctctggcttccctaccttgccatcttccagatcctcttcctctaccataggtgttactacccaggatcctcagacctctgtcctctagctcccctgcctgggccatctcctctgctctcctggctcagtgttcccctccatgcaggggattcccatggcccatgccctctcccaagctccagtccccatttctatcaccccccacgtgccttcatctgaagccctgcctggagcacctcaaccttcatatgcccccatgcaaacttgcggcttatttcccaatctcctttctcccctacccttattttagttaactttgcaccaacgtcctcaccacccccaccatctccaacggcttccttccttactctgatgtccaatcagctgccaaatactgaaattctacctcccaaacatctttttcatccatccctgtctcctctctgtcttgctccagaccttcaccacctatagcccccatcagtctctcccttccagcccaacatcccgtccacgtacaggcacacaccctgccatcaaatgagccttcctagaacgcaatttcaatgagattactcccctgctgaaaaactttaagtggctccatattgtttatagcgatatttctcaaacttgcttggtggtaggaatacaggttcccactctccacgcccaccctcatgaatcagaatcttgaagaaatgtacctgttcttttatagttttaacaagcacccaggtgattcttatcatcagagcctttttaggaaacactagcaattagagtggcaattactctggcattcaaggccctccatgaaatggctccaacatctatttccagtagtaccgcccatattccttccttgtgcagagtgcttctgctgtctgtgcctgtgctcacattgttccttctcctttatctctctgagtcagatcctacctatctgtccaggcccaactagaatgccacctcttccatgaagacctttttgattcttccaactgagaaccatctcccccttctctgggctcccaccaccctctaaatgctatggtgagcaaccagcagccagcaatacctggctcaacacagatgcacaagagttggcactttttcttcccctttatcttctggagcactcctcactgtcaccactgcatccagacagttctggtcatttactcctggggacaagaacccaaaggagaagcttcagtgggtccttacagcatggaagttaaatgtgcaggctctggaaacaaactaaccaggtttgaaccgcagcccccctacttgggtaagctgaggatctatgtgcctcagttttcccatctgtaaaatagagttgtgaggactaagttaagtactacatgctgtcttcattagttctggagactgggaagtccaagatccaggtgctggcagatccagtatctggtgaggggtcccttcctggtttgcagatagccaccttcttgctgtgtaccccacatgatggccagcagagagaagaagaaagctctctcatgcctcctcttaaaagagcactaatcccaccctcatgacctaattatctcccaagtgccccacctcctaataccatcacatcagaggttcaatctgtaaattctggggagacacaaacatgcaatctacaataagtgctcactaactgttagctatgatgagctacagatcttagggacaatatagttcagtggttctcaaatctgcctgttgattcatctggggagttaaaaaaaataccgatgcggctgggcgcagtggctcacgcctgtaagcccggcactttgggaggccaaagtgcgtggatcacgaggtcaggagttcgagaccagcctggccaacgtggtgaaaccccgtctttactaaaaatacaaaaattagccaggtgtggtggtgcatgcctgttatcccagctactcaggaggctgaggcaggagaatcgcctgaacctgggaggtggaagttgcagtgagccgagattgtgccattgcactgcagcctgggcgacagagtgagactcagtctcgaaaaacaaaacaaaacactgatgcctaagccccaccttagatcaattaaaaacatggtacctgaagatgaggcctgggcatgggatgttaacatgaagctaagggtgagaatccttagctagtccaaccctccacccactactttattgacgagaggtaaaggacttattcaagtgcgcacagctggttaactgtagagcaagtcccacactgaaagcctctgccctccctctagcctaatccagagtgatttccaatacgatttccaatacgccattgcgcagcctttgctcccgcgtcattgggttgggagaatcatctaggcaggaggcagagccaggcccactcaacctcactcagcaaaagtagaggtaaagaagtggggaaagtttgaggaaatggaagtggggagtccctaaggactatgagcttgggaggacaaggtcaagaatggatggggggattttgtgactaaatggcatgagattctgagagaaaagacaatgagggtggggatcttgtttgccttgattgtaactgtctttctagtaccttgcacagaatatagcataaagtacgtgctcaacaaatgtttgttgaatgtctaaatgatgcaataacatcaaaaagcacatgttctgtttattaagtcacccagagggcactcacattcctcaagggggcagtggtgagaacatccagaggggagcacaaaagtaaaagaatcttggactttcagagacactgaggcacagaggaggccaagctccctgaaattccgaggagaggctgctatgtgggagggaggcagtggccctgtgtgccagatgtttgcagggcatcctgaactctctgagcatacagaatgccacaggggacaggcagataaacagagctgtatcctgggccaagtggagggggcctggtaagggaagagggaggtgggaagaaggaggctgggggccaagccagctgcctcttgatagggggagcggggaggcggggtgctctgggccagtggttggttcagatctctggccaaagcaaacctgcctcagggggctgggggacctctccctccctgcccggatggaatcaaaggctaacaggaaccctggagggtccagctgtgacccttgctcctcacactcagcagggcccattaaccccgtcctccccatatcctcaacacacttttcccagcccaaagaatctttgcaaacagactcccctggtatttgctgatcagataccagccaagagatgtcaggttttcccagtctcaccaccagccctgccttcctcccccaaagatacccagaccctgtcccacctctcacagcggtgctctgtaagaacccagggtagcctttgctcaaaccggagcccttccttttttccatgccaagagttaaagggattcgattcatttctatgagtcataataataaacaaaataggagcacctgcctccatgctcacaaacaagacaggacaacctaccctcttggatctccttctgaacccaggtctccaactgatggttctcacacaggtacaacctgcaggtaactcctgctgtttacctgagctgagctgtgcgctgaggcagaaatagcctggaatttggggatcatcagaactggagagggacctcagagattttcttttttttttctttttttgagacagagtctcgctctgtcacccaggctggagtgcagtggcgcaacctcagctcactgcaacctgcacctcccaggatcaagccattctcctgcctcagcctcctgagtagctgggactacaggtgcctgccaccacgcccagctaattttgtgtgcatgtgtatttttagtagagatggagtttcacgcattagccaggatggtctcaatctcctgacctcgtgcctcccaaagtgctggaattactcacagattttctcatcccgttccttgtcattcagatgaagatgccaaggtcagagtagagaagcctcttgtccaacatcacacaggtggttagtggcttcagcaggactagcctcagctgacttgactttcaggcaagagtccattgcattggaccacggtggggactgtgagaggacaggagggaaagcagaggcacagaatagcccaggccttcatgctcctgggaagggttgacatgggttccctgggctacaccatgggtcctttcctttttctcccttgggacttccacgtgaagaaggcacaggcagaacacaacatggagctatctgaatccagagagaagtaagaacgaaaggaggtgggaatgcagcacaggcagaggctggggaaaatgcttctgggtgcttttacatcctattttctaaattctatacagtgtggttttaacaataaagaggataataaaaatactctggggagagattaaaatgacagaaccagctgggtgtggtggcgcatgccaatagatgcacaactctggaggctgaggcaggatgacggcttgagcccaggaggtcgaggctgcagttgatcatgccgctgtactccagcctgggtgacagagtgagaatctgtcctttttttttaagggagagagaagaagaattgtttttttttgtctgtttattgttttttgttgctgttgctgttgttgttgttgttgtttttgagacagggtctcacttcgattgcccaggctggagtacagtggtgcaatcttggctcactgcagcctctcaacctccctgggctcaggtgattctcccacttcagccttatgagtagctaagactacaggtgcatgccaccacgctcagctaattttttcgtatttttattagagacaggtttcaccatgttgcccaggctggtcttgaactcatggactcaggtgatctacccacctcagcctcccaaagtgctgggaaaacaggcatgagccaccgcgcccagccagcagagatttttagaatctactttgagtagactgaaaagaaagaccatgttgaaggaatggtttaacagataaagaaaaaaaataagataaaaataaaagaaagaccaaaaagaaaacggaggagcagatgttaaaggagagatggggagaaaattcaacaccatccttgtagtccagtgaggaaactgacacagcagcaggacttggacagccactctggggctctgagcccaacctttatttatttatttatttatttatttatttatttatttatttatttatttttgagacggagtctcgctctgtcgccaggctggagtgcactggcacgatctcggctcactacaacctccgactccctggttcaagcgattcttctgcctcagccccccgagtagctgggattacaggcatgtgccaccactcccagctaatttttatatttttagtagagacggggtttcaccatgttggccaggatggtctcaaactcctgacttcatgatccgcccacctcggcctcctaaagtgctgggattacaggcataagccaccccacctggctgatcccaaccttttaacaggtcactataacctgagggagtgggaggacagagggctggagaggcagggagagtgagaagtcatctttcttggacacttgtcatggccagtccaggccttcccggctcccctcatctcatcccccaaggtgggctccctttggaagcagaaaaactccacccacactcccagaagacctcagaagcctgatagcagtgacaagaccacaggccctaaagaaaaaaagaaaggagagttagagggaatggaagaaggagaagaaggagagatgcccagaggggggttggcagccgagaggaggaccagaggagcagggctggagagctgggcccaaatcaggactgggggagagaagtggggtgccggggcgggaggagggacgatgggggtgatagagcctcccagctcttccttccctcccactctccctcctcctctctctctttcatgatcttgaaacaaccttcaagtctgggctggaggccccaggaggccagtcacttaggaaacaaaactgtttcttggagaccttgaaagcccatctgcagctgagcagcgtccccaccccctccctgtgcacacacacattctcccatggactctcacgtacacccacacccggcttcacatgagctccccaatggcccacatgcacgcacacacggactccacacttgatcttagccaaaaggccgagaagcgatgcgcactcacggactcacacgcacctctgtactcatgcttgcatacagacaaccgattcatagcagattggccacacatccgaatgagtgttgtcctctcccctgaggagctcctcctttggaatgtggtttggtaccaccactccgtctcatacctcacacaggacccaacgctcaggtcctcccagtcattaactagcacacatctgtacacaggcacatgcacactcctgtctctctccaactgtcttggtctctctctctctctctctctgtcacacacacacacacacacacacacacacacacacacacacacacacacttcttaccaaccaaatatttgattcaggaccactccatccccactttgcccttggtggatccccctcctgatctgtgactttctcagcccactccccagcccaggcatcttggccttccatcctcctgctttcaagtctttctttctctctcctttgctcctcttactccaagggccttgatccaaactggtactgctgactgtgtttgaagaaacagtagcccaacccaggcactccagatcaaacgatcaggtgtctacacctgttaatatcctggaggctgaggttcatggtggacaagaaggaggtagaccactccagagcctcagctctcactgggcaaggagggtggtcagtgatgcacggtggaagtataggccctgggtgtcctgcccactctttgatttctctgagccctaaatatgtgagcagcagcgcccctcgggctgtgctctcgcccaaatgcagggcatggcagggagccccagcaggctgtaggggcagaggaagggcacatcctttccggtattgagtttggccacagggaccagagccagggcctttggaaggactgggcagtactgggaggtgccagcaggggtgaggggtgggatgaaaactgttagagtgcttgaggtttgcacaccttcagattcggggactgacgttttctctcctatctcaggttgtgttctggagagggctgggcagaagattacccaggaattccaacccaggaacctacggaacaggcgcttcctaaaccccaatttatcatgttgttcccacagcccccaggcaagcctgccccaatgttgatctccctagctgcctcggggccactctggagtgactttgctttagacagtctctcctggtgtctaaccacaggctttcccgctactcccctctcactctctccttaacacacaggggctgaactggtatctgttcccttcattgtttcctccctctgcccattctctcccaagaccaaatctgagctcggagaggggggccatgagaaggccctgttggccccatcctacccaccctttctgactgtaacccagagagggaaggagcgtggaagtgagatgtgacctaccaggtccctgtaatggaaaatctcaactgcaggcccggagggggccagttatttagggaattcagatgttagccttgtgccctgagagtggatttgctagaggagaggctgataatccctctgcagggagttccctctggggccagagatggacccagcccagccagcaggcaccttaggcctctggccaaagccccccttccctccctcccttcctctctgctttctttgcactcaggacacttagacctgccccactccgctggcttcccctcactccatctctgtgcccagagaaacaggggtactccaggggaatcctgtcctctgactgttcccagtagaaggcgggagcagaattttttcttttctctctgccccttctgggttccccttcctctctgtgcccctcatcctttggattactcatcaaatgagcagcaacaacacccctagaccagctggtcctgtcctgggtcatctcgttgtccccagtttctagctggtataaggttaaagataccctttccagccccaggcaaagccttaggcatttctgggattgctcctgactctgatgggcatcctcactcctcagacatttccaatctcccccacttcactgcagagaggcctgttctccagcctcagtcctgcatgctgcagctttgcttccccttccccactggaagaaggaaacagtcgctctcctttcccgttcacatgtctgatatttgctatgatattgaccttcacacacatcttagaggttctgtattttcctctcttttgacttctccctatcactactctactcaggcatagattcagtctagagctcttcaacagcaatgaaacggtaaacgaggggtaaacaaaacccagagatgtcatcaggtgcctgctaggagtcccacccgttcccctctagccctggcctgcccctccctaccagagtcttgattctccttcaaaactttggagaggttacatctggcagggtttggggacaccctcttgcctccatctccaaacttcccgctgcctcccgagccacctttgactcctcctgggccccccttccaggtgcctcaagtgcagaggtcagccttcggttcaaattctatttctgggcttcagtgtccctgcaacctctataatagaaggaacagagtggtctatgtttctttctttctctgggagattggatgtagactcgggagacctgagttctggctctgtcttatcaattcaaattgtttaatctctctgagcctcagtttacccacttggaaaagaagagttaggccacatggtctctgtcatcctgggattctgagtcaactgctccccttcagccagatcctagggggcatatccccccaacctgggacccaggcccccttcccttgcagcctctctcagttgtgagtgccacaggccagagggggttgagaggagccaagggggggcatgccgtgggacaaacgggctgtctagggccagtggctaaaggggcgggaggggaggagtcctcagggatcctgtttcaacaaacgtttctttcggaggaggggaaggcgggggagagggggagaaggacctatttaaagctaccctgttgctttggctttctctgtctgccagggtctccgactgtcccagacgggctggtgtgggcttgggatcctcctggtgacctctcccgctaaggtccctcagccactctgccccaagatgggccgtggggtgagtatccctaaagagcaggggtcgcagtctagagggtgagggaggctgctgaggaaggatgaagtgggaatgggatgtggaaggagcgggagagaggagctgagtgggatacttggaacttgaaactaacagtctccaaactaccaatgtgtgtacagatcccacggcggtcacataccctagtgctctcctctcctctgcacgccccagccccctgcccacagttagacccacagcccaccacacatgccccctccatctctccctccaccccactcccacatctctagtccttccctgcagcagtccctcctctcactgcatctcccggcctcccagctgaaaggatgtttggcactgtgagtcctcctgtctttgccacctcctgaaaatatccattcctctgggagtcctagcctgagaggctgggggtccattttgaggttagagaggggcagtagagcatccggctcccagagtcaccaagtagttccggacaccagctccaggggccctgagtgccaaggacagctgggcggggtgtggggaggaagaatgatgccccagcccccaccccagcacccctccggatgtcccgagcagcattgtccgtgggttccaagccatgggctttgaggactttcccagaggctggtgacagtgacccccccccagtccacccgtccatggcattctgcagcaatggctacaccaagaggaagattaacaacaatggggcgggcagggagagggctttgaattcttggaaatgaaattcccatatggagaagagtggcccaatccttttacatgctgtgcctggctgctttccttttgtggaatactggcaaaagaggacacagagggaaagggcatgctgcggaacaggagggtatgaggaagactgtgcctagggggagccgtgggtgtttctgggcccaggaggagtcaggcaaggacatgttattgcacctagttgagcagctgggaaatcctgagcctggacaccagggttcctgagctagggttggagccataaatagaattggagtgcatgcatgtatctgtgtgtctgtgtctgtgtgtgtgtgagtgtgtgtccttgaccacgtgttctccataggcggggagtcctgcagttactcatggatgagtacctgtgtttgtgtctcagcaggcaaatttgtaaatgtacaagccttcaagcctgcacaagcataaatgtcactgtgtgggggtgcttgagagtctgtgagcctgcccttaggagctgtgaggtatgggcttcacggaggaagaagtcatagctgcaggaagatatactgtcttgggaccttcagctgcatcttgacatctctggctccccatggaaagggcatccctagctgagatgcaggacctctgagaagaggcaggggttaaaggatcagataagccctccatttcccccatccaagtgaagagagaaggaggggaggtagccccctaccctgctccatcttagagcaaggtagacccagctcaggaggtcttgcttgggaagtgatgagaccttgacttttccagtctgtctttttcccctagcacccccaaactccccttaatcaccatcctaagttgctgtgggtgatgcaatagcaagatgaggagcagatctgggctgtttaaactaagaggctgggtgaggtgggggtatttagggcctggagcttagagttcaacctaccaacgacccctgaagagggaaggcatctgacacccacaacctgttctagggatgatttttcctccaatcccttctcccctgcatctccactgcagaggcaggcttcactgtccccccattacccagtggctgtgaagggcagcgtgggagttgggggaagggacgacactggtgggagggagcccagcctgctccagctaccacggagaggctgagatggggggagcgttggcggattcccagctgcccccactctgtcccagcctctggctttctcaaaaaggactctctgttctccttcagcattcaagacccagagagggggacttgtggttgggggagggaggagtggagggaggttgggggggtccttgcttcctctctttctttcttgcctgggcagccgctggccccaaatctctgcaggctcctggctgcagagcctgagatctttgccaggacaggaggagggggaaggggcagtgtgtctcaagctctaagcctgctggagagcagggcgggagcttgggaaaaggaggcactgcgtggagctgcttagctcagccacaatccagcatgccaaagtgcatggaccagcaagtttttaaaaagcatgcattttattccaatttttatgaaatttatttcacatctgaatatacagaaattcctctgcaccctgctcttctgcccacagacccagccctgctcctctgtgtatgcctgggcccccttctgtccctgaagttcctgagggtcacactgaagctcagccagcctgatctcttgcctctgttcccttgattgcatttcttccttttctcagctctgtcccaccacagacagttagtgaatgtaaagcatttcaatccactcaattaaatgaatcctcttaggtcacctgagaaaggcagaggcagaaccactcacaagcctttccccaccccttccattgggctgctcggtctccccaagaagatctgcctttaggaggccaaaattataccagattcatagatgcttcaggtggagacaaacccacgattttactggtcaccttttctgagaagagcacttctgagcaacacagcctccaaaagctcatatctttttaaatcattggtatcttgggaacaacagtgttgacttctccttgcatcccccacccctacccttgcttctgattgtactggtcagacttctacctctcaagatgctgaattggcgacctcttatgaacaaggcagctgccatacttctgggattgctcctgactctgataagtaaaaaaggcattaccctggagcacaaaagtcttagggcagtgaagctattccatatgataccacaatggcggatacacgtcagtatacatttgcccaaacccatagaatgtacaccaagagtgaactcaaacttaaactatgggctttggacgataaagatgtatcaatgcaggttcatgattgcagcaaatgtaacactctgatgcagggtgttgatagtgggtgaggctgtgcatgtgtgggggcaggagatatatgagaactttctctacttcccactcaattttgctgtgaaccagaaaattgctccaaaaaaagtatattttttaaaatgcaaacaaaacccccaaaactgcattatcctgcaaaaaaaaaaaaaaaaaaaaaaaaaaagcaaacaccttggctgtggaccctacccaggtatccactctttatgggaaacaaaagttaacatcatagtgtgggaaaactaattcctgaaagcctagtgcagactttgcagaatccagtggagaaataggcaccaggtggaaactgagcagcccctctatgacaaggactctatttcctgagggaagtgggaggagagaagactggggcagaagaggaagtaagaaggtacctttttgggaacttttcatggctacccaggccttcctcagcctctatcctattctatcaccccaagagggcctcctcttagaaggaaagatttcccaccctgtccccaagaagttccctgtgagaccctggaaggctggtagtggtgagcccacaggccctggagtggaagggaaatcaggagcctcataagactacaattaaaatgtccatctgctcaggcgcagtggctcacacctataatcccagcattctgggaggccaaggtgggaggatcacttgagcccaggcaatatagtgagaccttatatctaaaaaaaaaaaaaaaaagaaagaaagaaagaaaattgttttaaattagctgagcgtggtggtgcatgcttgtggccccagctacttgagaggctgaggtgggagtattgcttgagccctagaagcggagggtgcagtgagctgaaattgcacactgcattccatcctgggtgacagagtgagaccctgtctcaagaaaaaaaaaaaggccatctgattcaccagatgacccaggaatgtctagacttaaaaactatataaaatgtagttttagatttactctcagatacaatttcttatgttttgggacaaatggggctcagttcccatgttacccaattgtgctttgggggtccagtcctgtgagttgcctcccgtctagtaacgggcaggcctgcccagcaggatggagagggctcccagcacaccccatgtctccacttcctggacatgccctgactctccagctactgcctcctctcagtccatcaggcctgctctttccatccctaccattccaccaccagacctggctctcctctggacacgttcctgcctaatcccctggctccccaaagactcttactcccccaagttcctgagtatttctacccctctctaagtaaaattgccatggtgttgggctaagacattcctacagagtgattctactccctcaacaaccccccacaaaaccctgtccactcccttccagaattttcccaaatagtgtaggatacaggttttcaaaatttttgttttgttttgtatttagcagcagggtcctttcaacaaacaaaatcttagcagaagcccaagcattaaaccactcaagtggtgcttttcagtcctgagcccctcacccttctctgaaactcacatgggagcccctggttctgccaatagtctacaaactgagggcctagggtccctcaccctccatcccccctatctcccccaaggcagccgctgcttttgaacacacacccccactgcctgggctccctggctgagtggtgggaatggaggccccagcccctctcttccctgactctccggctctccctccctcaggctggccgtgagtactcacctgccgccaccacggcagagaatgggggcggcaagaagaaacagaaggagaaggaactggatgagctgaagaaggaggtggcaatggtgagggaactgctgggccatggaggaggggccccatgctgggagagctgtccctgcagcccattgcactcagagaaactccgtgtcccccatgctgctcaactcacccctgtgccctgcagtaccctcatatgcatcttagatacctcctccccaaagtaactcaccctcccttccccaggatgaccacaagctgtccttggatgagctgggccgcaaataccaagtggacctgtccaaggtgagtggaggggcttctagggaaggaacaaaagaggcaagaaaaccatgcagcatcaaggtggcaggagccttaaaactgtaatccagccttctttacagatgaggaaactgaggcccagaaacaaggactggcccaaggacatgcagctagttggtggcacagccagaactagaatttggatcccctgcatcctagcccaaagctctctccctgtataccctagaagccaggactccctatgacccaggccccagagggcctccaggcagggcccttccctataccccaagcaacttcagttgcacacagccttccacagagctgacagctgatgcacatgggctgacagcccattcctgtggttacagtgatttgctgggcccctgctacatatgtgacattgtgatagatgcgttacatacatttctctaatctttacaacaaccctttgagataggtattgcagacctgtttattaaacaaaggagactcagagagggagagtaacttcccaaggtcacatgaacagtaactggtacagtcaattgctaagcccttcaattaaaaatttgtttaaaaatcattaatcaaaaaatgctgggtgtggtggctcatgcctataattttaccactttgggaggccaaggcaggcagatcacttaaggtcagcggtttgagagcagcctgggcaacatggcaaaaccccatctccactaaaaatacaaaaattagcttggcacagtgatgggcacctgtaatcccacctactcgagaggctgaagcaggagaatggcttgaacccaggaggcggaggtttcagtgagccgagatcataccactgtactccagactgggcgatagagtgagactccatcttgaaacaagcaaacaaacagacaaatatttagtgggtgtatatctcctttatgggccttccctgactgctctttctaaaattctatgcccctattcctttaccttactttattttccttagtaacacttttctatctggcactaatatgtatttgtttattgtgtgtcacctctccagatcataagctcctcaagggcagagactttgttggtcttgtccatctctgcatccgcagagtgacaattgtgcctggcactggatatacatttattaaatgaatgaatgaatgaaaaaaaaaaaaaaagaaacggtccctgctttaaaggagctcaaagtctagtagcagaaaaaatgcaatcctaggattccaatgcaatatggtgagtgcagctctagaatcaagtatagaacaccatggggaaccagaaagaagcatctgaaccagcctggggctgagggaatagggccaggcaaggctttctgtggaaagtgacaggtgattgccaaagttgtgtgacactgatggtcaataatgtaggacttgagcagggtgtggaggtgcccacctgtagtctcagctacttgggaggctgaggtggaaggattgctttagcccagggttcaaggatgcagtgagctataattgcaccactgcgctccagcctgggcaacatagcaagaatccatctcttaaaaaaaaatctaggactctcctagaatccttgataaaataatctgaaggaagagagatggggaaaaaacagttgaggtgtctttccagggagcttatccagactgcctccaggggagatgttatggccctaaccataggtgttgtctcaatccaatataattaggggtcaagcccagtcaaacccttctcagccctcaagccctccaagttgcatcacaaatgccacctcctccatgtggtctctcctgatggtcccccaccccttccaaccaggtgggactttccttctgggcattcttcccatgcccgggagctgaagggatgggcatggtgactggctgggttggctccggatgcgtgcccctacgcctctccttgctccctcagggcctcaccaaccagcgggctcaggacgttctggctcgagatgggcccaacgccctcacaccacctcccacaacccctgagtgggtcaagttctgccgtcagcttttcggggggttctccatcctgctgtggattggggctatcctctgcttcctggcctacggcatccaggctgccatggaggatgaaccatccaacgacaatgtgagcccacacgcctgacccgggaacagcccgtgactgtcctccaaccctgaacccccaacacagtggggggtgggcagggaacaaggccctcacataacagtcctacagatgcccctgcatcttaggctggaaaggggagaggcttctatatatatctgtaaagtactcctccgccaacagtgcatacacattcacatactcattaattaatgaaacaatctctccctgttcctccccgcttaagtgagcctgtctgtgtgcctgggtcttcatcccctagcaaagtcctaaccctgggaacttcctaagactttccctcccatttctagtcttaacaggcttgaggttggcagatcaagggggaggttagtgagaagggctttcccctaccatcatcactctcagtcacagacaaaggtctgggctgtcatcttggatggcactgcctgctcatcccaagtggcagctgcccctttagggttggggggaaggtcaggtccctgaaactctttctccttaccagctatatctgggtgtggtgctggcagctgtggtcattgtcactggctgcttctcctactaccaggaggccaagagctccaagatcatggattccttcaagaacatggtacctcaggtaagatggcagggctgggctctgggctaggctgtaaggttttggcaagagtccagctcatcttctgtcagctcccaggcactaagatagagatggacagaaaagatcctccagctttccatgccagcacctaattgtttatggggcttctccttctgcttgacggtgtgggagaccagcaggagaagaaggcaggggcagagacaagcatttcatgagctgcctgtggctccccacagcaagcccttgtgatccgggagggagagaagatgcagatcaacgcagaggaagtggtggtgggagacctggtggaggtgaagggtggagaccgcgtccctgctgacctccggatcatctcttctcatggctgtaaggtgaggaggtcataccagagcaagcagttgagtctaaggagaaggctgtgtgcagagctgagaggggcccagtgaggtttaaaggtggagagacccaggtccaaatgtcaacaccatgcctacgcccctgctaaaccttctctcagtgtggggtgcttgtgcagtgcctccttgcatctgtgtgttatgaatgctctatgccccaggtatttctttgttgtccactttttagcaatcgtgtattgaataccaattatgtgtcagctgctttatatatgttcgatgtgctatctgatgtaattctgaaagagtggtgtaatcatgcagggctgctgcatgtggccacacacgttgcatcctgaatgaccccaggaggtgcattttcataactacagtgttagtgtctccccctgtggttgtgcaaggcagagattctgtttacattcaccattttacagttgagtacatggaggctctcttggttaagcaagtaacccgaggtcacataagaagtcaggaggagtcagaattccaaaccagggcaggggcaatagatgagtaatgccataaatatgtgatgagggcaagtgtgactttgttcctcgtgtcatgaagattgagtgtggttggaggtggttcaggagacagctgtgtgcatacaagtggctctgccagtctgatgactatgcactccttcctcctcaggtggataactcatccttaacaggagagtcggagccccagacccgctcccccgagttcacccatgagaaccccctggagacccgcaatatctgtttcttctccaccaactgtgttgaaggtgagaagccaggctgccccctgtaggaaagagtctgaatcctgaatccatagtcaggatgaagggctctggtagtacttacctggcaaaagctctgccattggtggggcaattgaggggtcagggggccctgaatattatggaaacaccctccacagagcagggtattgactgagggcagcctgactccatgggaaatgtatctcccttccccagggagatctctgttctgtccaccccaagacttgagtggatttcaaagctttcaggtattgggttaagaaccccttacgcatgcgcacacacagatgcacatacgctcagaaccaacctggattcttaggagtctttggatttgattgatgcttctattccttgtggttctgggcctcgctgcccccttcgataacctttgctttggccagggccccagggtctgggagggccaagaaggcattctggccaggtgaacacttggggcctacttcaggctgcttctaacctttgttacatcaaaagacatgtttcaccatgcacagactacccagtttgccccatccctgttctgggttctagagataaacaaaggtcaataagaactcccagagctgccattacttaatggcaggggtccaagcacaactgaaacctgtgccctctgtggtaaagccagtgagcagagtcagggctgcatcagagaaggagtaggagggaagagacagaaagaggcctcactagaccagtggcctctgaaaatagggcaaaggaggcctcatatcccaatccacacttcccctgtccattactcatttctcctcagtgtattatgtttctctgtggtttttttcccttcttcgacaagttggaattccactgcttggaatccatgagggattggttccaggacccccttcgttaccaaaatctaaggatcctcaaaggccctgatatgaaatcgcataatatttgcatataatctgcgcacatcctcccatatactttgaatcaactctagattacttataataccgagtgcaatgtaatttttatactgttttgtttttaaatttgtattatttttattgttgtattgttatttttatttagctccaaatattttcgatctgaggttggttgaatctatggacatggaatctgtgaatatggagggccaactgtacaaataaaaatcaccacacattacatttcctaagtttgttttttgttttgcttttgagacaagatcttgctttgtcacccagactggagtgcagtggtgcaatcacagctcactgcagccttgacctcccaggctcaagcgatctcccacctcagcctccagagtatttgggactacaggcgtgtgataccacacccagctaatatatatatatgtatattagagatggggtctcactatgttacccaggctggcctcaaactcctgggctcaagtgatcctcctgcctcagcctcccaaagtgctgggattacaggcatgagccaccgagcctggccaaatttcctaaatttttaatgtactgagattttgaaatttacatttcccacaattgatttattcagaaatgcctagtaatacattcctattgcttactctgcaattggctttgaaaagaggaaaggaaataaatgagatatttgttgagcacccgctatgttccaggcactggcctaagtatattaaagcacaatctcatctaaatattaaaacagcaccgagataggaattcaaataaggattcaaacccaaatttggctggctccaatgtgcatgcttttttcaatacaccacccttccttcccagaagacccctgtaatgtcacacaagggttagcaattgcctggcttcctctatagagattcatgcctaatgttgagaaagaaaatcttaagactggatggaaaatccataatgagtgctttactttgtgttcataatatacttttggatggtatcaagtatgggaatgattttaccaaaatgccacaggcaatttttatttattgaatcttgtctatttgaactttgagattatttgcaagcttctccccaggctcgagtacaagagaaaataatttgctgttgtattgattcaaggattggcgatctatccagggaaaggaaggccaagtggggacaacctactgaatgtggcctccagatctgcggctttggctcacctatcctgtgatgattttccttgctcaggaaataggatgggactgcagtccctgggagccacaaggcacccaacctgatgccccaccatgttgcaggcactgccaggggcattgtgattgccacaggagaccggacggtgatgggccgcatagctactctcgcctcaggcctggaggttgggcggacacccatagcaatggagattgaacacttcatccagctgatcacaggggtcgctgtattcctgggggtctccttcttcgtgctctccctcatcctgggctacagctggctggaggcagtcatcttcctcatcggcatcatagtggccaacgtgcctgaggggcttctggccactgtcactgtgagtgggtcaggctgaggtgccaccaggggagggtctcactactctttcctcagagtgatagaggcacagttgcttgtagcttctcactactttttccccctagagtcacttattggatgcgatactcagagatcacttaatacatggcttagggtatgagttgagaaatctcaggtggggctattcttaggcactcagtttctcttttggagcttgtcacggctgccttttctcacgatctgccagcagtctgggtctcattccgtccaagtctcctgtagaggctgtctcaaaggtcaccagtcactaactagcaaatccagggaccttttctcagctctcctccctaactctgctgctgaaacagatactgctgtccaccctcctaccattctctcttttgtcgattgctgtgatgtgtcactatcctggttcgcctctcctctgtcccttcctgctccccctacactgattctcaggcctcagctgtctgttcttcctacaccctgagcaagagccaatctcctcccagtttgcagtgtcccttctgtgttgatgactcagacatccctatgctcagctctgctctggccctctctggagctctagtcaaacgtcttaaaccccctaatgggcatttcatcttaacagatactcatgatctcaacacatctaaaattgaacattcattatttacagctaagtcccacccattcaagttagtggagtagaatcaggggaggaggaatggagccacggtctagggtaaggttatggccatctccggcttcagccttaaccttttttattctcctctttctctaccaggtgtgcctgaccctgacagccaagcgcatggcacggaagaactgcctggtgaagaacctggaggcggtggagacgctgggctccacgtccaccatctgctcggacaagacgggcaccctcacccagaaccgcatgaccgtcgcccacatgtggttcgacaaccaaatccatgaggctgacaccaccgaagatcagtctggtgattgggtgctccagagggggtggataggattagaggaggctgagggcagtggcgtggtggggtgagtggttgagataaaggctctaaagggagccacgctcctggttccccctcatttcctcccaggggccacttttgacaaacgatcccctacgtggacggccctgtctcgaattgctggtctctgcaaccgcgccgtcttcaaggcaggacaggagaacatctccgtgtctaaggtagggggtcaggacacacaccaggtatgttttgggggtgtctccaaagcctcttgctggccccagctttccttctcacatgatgtggctgccttgggggtttcagtgccgccttcacctgatcctccactcccttccctcccatgctgacactgaattcttgtctcttctggcagcgggacacagctggtgatgcctctgagtcagctctgctcaagtgcattgagctctcctgtggctcagtgaggaaaatgagagacagaaaccccaaggtggcagagattcctttcaactctaccaacaagtaccaggtctgcttgggttgccaggacagaggaagagagagggatataaatgggtgagggtggacaaagccaaggggaatcatcactagcaggagtgggggtgtctgagggtcatgttccctccccctgctaagtcccccaggacagctcatatgactgcatgtctgattgcaactagccccagctcccaaaccttactccatcccttactacaatctgtcactctctcaactcttcttcccatagctccgcatcctctggcctagccttccaactcttctaccccagtcagtgaaaccataattctgtaattcctttatggtgccccttagcctttaggcacctgttaaatgccaagaatgcaatctcagcattccttattatccatagaggtaaagccccctgaggccaggtggtggtggggatgctgaggagggagccgttcagcccctagcacagtgcctgtcttaacctgacctcaataaatatttgttgaatgaaagactgtcctacggaggtggctctcaggttacaagtgttggaactgtgaggtctaaacacccccctgcacaaggagattctctttgttgacaatctttgatgggttggggctacttttctaaggtggtttccttaccagctgctgctctatgccgcgctaccaagacaagtatggccctctctgtaactacctgttgtctctccagctgtctatccacgagcgagaagacagcccccagagccacgtgctggtgatgaagggggccccagagcgcattctggaccggtgctccaccatcctggtgcagggcaaggagatcccgctcgacaaggagatgcaagatgcctttcaaaatgcctacatggagctggggggacttggggagcgtgtgctgggtgagaggccagaaacaggaggctcagaaggggattcccaagcctctgcggcatccctggggtgggggactgtgggggcgtccaggaagccactctgcggatctcactgatcccttctgcccccctttaggattctgtcaactgaatctgccatctggaaagtttcctcggggcttcaaattcgacacggatgagctgaactttcccacggagaagctttgctttgtggggctcatgtctatgattgaccctccccgggctgctgtgccagatgctgtgggcaagtgccgaagcgcaggcatcaaggtactggcctcccatcctcccctccattctagcctcccccatgccagagttcaaggagctgcagtggctgctgccctggaaaggcccaggccacggtggcctccttcccactgactcagagaagaagctgtccatctgcaaggaaaggcccacccctgccttggggcactcacccttatcccttttgctcagagaggccagtgtcccatgcccctcctctccctccctggcacagctctttgtcccatctgcatgtgtacccttccattctgatttgaagcataatctggcactcctatcttgaagacctagttgtcctacccttcccaactactgcccaccctctctgtcaacttaggatgggattagcaggctcttgtatgctcccagtggctcagcccataaccccacagaatgcctcccactcaaggttctcttgttcaactacaattgcttctcactgaccactccctcctctgtgctatgtttgttcttcattcaacaaatatttactgtttactatgtttcagacactgtgcaaggtgcaaactctagcaccttgcacagtgcctgatacatagtaaacaatttgtgtcacatgacacatctagatgggacaatgagctgtgccagggaggacacatataaatcaggcactattctaagcactaaacctctatgatttcatttaatctacgcaacaaccctgtgaataagcaccagtatttttccttttttacaaagagggaaactgaggcacaaagtaacatgccaaggccacacagctagtgtaagtcatagagcaggtacttgaaccaaggcagtctgctatttcttaactatcataccaggagacttgtttctgtgggtgtatgtggtttctgaaccccataaccactctgtctccgaggcaggcatcattatccctgttaaaagtaaaacaaggctgggcacagtggctcatgcctgtaatcccagcactttgggggggtccaaggctggtggatcacctgagataaggagtccaagaccagcctggccaacatggtgaaaccccgtctctactgaaaaaaaaatacaaaaattagccacgtgtagtggcaggtgcctgtaatcccagctccttgggaggctgaggcaggagaatcacttgaacccgggaggcagaggttgcagtgagccgagattaggccactgcactccagcctaggcgacaagagcaagactccatctcaaaaaaaaaaaaaaagtaaaacaaatggaaactgcaagtgggtaagtcttttccccaaaataaaaccaccagtaagtgatggactgggactatgaagcatgatctgcttgaccggaaagcctgagctcctgctgcttggccaggtgcctctctctgtgatcagaaccatcacggaggcctgggcagaggacctctatgggaagtcagctcagggaagcattaattctgcctcagagaactggacgatgtttgacaaaaggaatgatatttgagctgggctttggaggtcaaagagtattctgcaaagcagtgagggagaggaaggcatgtcaagatcagggaacagtgtgtaccctggcgtggctagactgtacggagcgtgtgtaggggttggcaggggagaggtggcaaggagtactgggggttgagactggaacactgggtcagagccagttggaaggacttggcttaaatgccagacttgggctttatcctgcaggccacagagagccatcagtgtcacgggggaggttgagcttttaggagactacctggtttgaggagggactggatttggggaagaactggagtcagggagagacaggttaagaggccattgccatagttcaggcaaagaatgatgacctgaactagggcagaaacaaagggaatggagaggaatagccatgtctgagaaatgttttgagaacttggtgaccaaactggatatggaaggtgaggaagatacaggagagaaggggacaggatgaatagagaggacaacatctaaggtagggagcagtagcaggcttggtggggtggcaggagtagagaaaaggagttcaatgttgaccttaagcttaaagagtctataagataccccaggaaagacagatgttccagtgaacattggagtatggtttagagctcatgaaagatggtcaggactggagatttgaatctcattagcacaagggtgcaaactaaaggcttatagtatgttgtattatattgcccagaaagagcagacaggtcaagtgaagggaggagaatgaaatcctgtgccaaaccaacatttaggcacaagaggaaccagtgaggaggggagagggtggtaggaaccaatgccatttaatcttcatgaccacctagaaaggcaggaatcatctctgcattgtgctgagacctcagtgcttcacttgcctaaggtgctgtagctggagaaggtcggtgtttaaacttgagcccctcattcaactccaaagccactgcttcttccatcctactaggctgccaccctgagaggctgggaaagagcatgcagaggagtggagggaaaacaggaatggaggagtatgtggaagccaggggagggcagggtttcaaggagaagaggtcaacggtgccaaatgcctcagaggggtcaagtaggatgaggacggcaaagacacttttcatttttcaattgagaggcccctgtggcctttgggtggcagtttcagtgaagtggtgggagtggaagataaggcagtggggaccatggaggcttccttttcagtatccataggacttgccctgcaagcccacacatgcaaatgctatcctaacccaactctgctcacctcatagcctcttagcccatcagatgccagccaccctccccatcccaactccattcactctgcaacaatagcaatgaacattatggtgaaggtagggaccaccgtgctcaccagggaggatgtcagaggcagatgctcaaggtggtggaggcaggggtgttgtctccatcttattcctgttctgtccattacattgctgcagtgatcaatatttgacactaagaacctcatgtcctatatccaggtccctgtgcatttgagcaaattgtagcccctctctaagccttggtttcctcatgtgtaaaataaaggagttgttaaagggtccttccagctctgactgccttgaatcccatgaaatccaaaatcctaaaatatctcctaaataatcctaaagatttgaggcttctcttccaggggatcctcatgaacttgttactctgttatggatactttcctgcacttaagcaaactatctctctctaaccctctgaacataactcaacttgccattatctttcctcctcacccacccactcaaattcacacagacacacacaaatccccacctcacatacacacacatcccacacacacacatagacacacacaatccccaccccccacacacacatctcacacacacgcacacatacacaaatccccaccccacatacacacacacacacataccccacacacacacacacatcccacacacacacattccctctcacacacacacacaatccccaccccctcacacacacacaatccccacccacacacacacacacacatcctacacacacatacacacaccccacacacacacacatacacacacacacatacaccccaccccagccactcccctgcccacagacgcacacacacatgcccttatttcggttgggatctgccatccccagacatctcgctatctagctttctcttactttgggagaggaacaggagggggataaacccttaatactactttcctgttgtctcctctccttcccactaggtgatcatggtaaccggggatcaccctatcacagccaaggccattgccaaaggcgtgggcatcatatcagagggtaacgagactgtggaggacattgcagcccggctcaacattcccatgagtcaagtcaaccccaggtgaggcctctgcaggaagcccctgtgccctaatcaacacgtcctcttgcacagaaggcttgggtgtcccctgggagtatttggatagcatttctgggacctttataggccttacctctgacactattgtgactggttcctcagccctgagcttgtatccaggctgtgccactgaatacccatgtaaccttggagatgtcacattcccttcctgagcctccattttctcaccacaaaattaggatgccatctccactgctgtaggagtgggatgtgagtaaagaaactagcccagggcctagcaaactgcacttacaactgcgatgatcccatggtgaggatttagactcacattctcaaagagaaatgggggaagtgagtactgaggagaggagaactgaagcaacaggggaagcaggctcagcagggagcctgcaggctgcggtggtgaagagaggcagggggcaggaggggctggtacaggtgccaggggtcagctgtctctgtccccacccaccctccagagaagccaaggcatgcgtggtgcacggctctgacctgaaggacatgacatcggagcagctcgatgagatcctcaagaaccacacagagatcgtctttgctcgaacgtctccccagcagaagctcatcattgtggagggatgtcagaggcaggtgagcacagccacgggaggcagatgacaggcagggaccggggaggcagggacagggccaagacaagcatggagtgagaggcgaggagccaggcttgggaaggggtttcgtcctcaagtgtggccgtcttccctccagggagccattgtggccgtgacgggtgacggggtgaacgactcccctgcattgaagaaggctgacattggcattgccatgggcatctctggctctgacgtctctaagcaggcagccgacatgatcctgctggatgacaactttgcctccatcgtcacgggggtggaggagggtgaggaggctgcatgggttgggatggtttgcaggatactgaagccggcacctctgttccctgtccctttaccccagttgaagaatcattccacaactctaggcagcccagcccactttagcttcccttgaacacaaaatcttcctctcttgggaagacaggcagccatgcttcaggggctgggggtggggaagagtccctctgacctccctgatgccctcagaatctccccacaggccgcctgatctttgacaacttgaagaaatccatcgcctacaccctgaccagcaacatccccgagatcacccccttcctgctgttcatcattgccaacatccccctacctctgggcactgtgaccatcctttgcattgacctgggcacagatatggtgagcgcaggaggtggaggaggggacaggcaaggcaatcgtgatggcacagtggcagggaggagaggtgcactggggcagtggccccagctgtgggggttacaggagacaggcacaggcctggaagacaatggggtctgaatacacgcttttttaactgtgtcaacgatcgtcactgtcgaagatcaattgcttctgtcatctcctacgtcccttcaaatgccctccctgccccatttcctaccccacacaggtccctgccatctccttggcctatgaggcagctgagagtgatatcatgaagcggcagccacgaaactcccagacggacaagctggtgaatgagaggctcatcagcatggcctacggacagatcggtgcgccaagccccgggcctcgggagggaaccccaacagggttcttttcccagctttcagaggaatgagccccaagcaaaattccaggacagaggccagctacccaagggtcagggacctccatctctggccctgaggggctgtgccccttctgcttcctgctctgaccctgcccctgcctttggccctctacccacagggatgatccaggcactgggtggcttcttcacctactttgtgatcctggcagagaacggtttcctgccatcacggctactgggaatccgcctcgactgggatgaccggaccatgaatgatctggaggacagctatggacaggagtgggtgagtggtgctgtgtaaacacagcgcacatgtgtgaaggtacgggaagctgaatgcctggcaggagtggccagtggtggccaactgggactggggctaggggtggatcaggagaaaccatgctaccttctggtcctaccctttcctccgacactctcatctgtctctgcccaccctccctccagacctatgagcagcggaaggtggtggagttcacgtgccacacggcattctttgccagcatcgtggtggtgcagtgggctgacctcatcatctgcaagacccgccgcaactcagtcttccagcagggcatgaagtgagtgcccacccccatggcacctacccacccaggctctgggcacactcaccaacccacacaggccaagcttccaactcagccctggaccagagctgtaaggagggcatcagattttaatcttccatctgtatatccatagataggtttcatatagaagagagaagccatgcttcaggctcctaattttgcattttgttattgtctctctccacctttcttctctccttctctccctcccttctttcccccatctcctacttgagtgccacctgctcctatcctttgcccagccctaaatccagtgtcttctgtgcccacccctcccctggccttccgcaggcagtctagtttatagcacttgcactgtggttctggaggccacgtgctgccgagggtcgggttcagcgcttcttgcagtgtgagttccagcgtgccaggcactgtgctaagtgcctaacacattgtttagccccacgatagctctatgaggtgggtattactgtttacatttcatggataagaggccccaaacaggttaaatgatgtgcccaaggtcaccaagatggtaagggttcaccagatctgtctctaaaacccagccctggctactacccaacatttctgtgctcacaccatctggcactgtttggaactcagtaatgactgtgattctattatgggtggtggttgagcgctgaaggtttcatgctggttccttttattttctcctaccataaacaatggccacaattcctcacatgaggttgttacagtttcttagtttggggctggggagggtggggagaagatgccaaagtgaagttaataacacttaagatccaagggagaataaagtgaaaagcctgttagataaataaaggtaacatgaaggaaggagattccagtaagctaaaaatactaatggaaaaaaaatgcaatttgaagagaacaaggagcagagagtctaagaaattgggtataattctggggcctgggacttgctatgcactgcagggatgacacacgaaggtgggaacatggccatagtggctgcatccagcccatcttagaggcaaatgggaaaaatggcaaatgaaaatcaggctgggtacagaggaagagtactaataccaccacaggcctcaccttaggtccctgggccactggggatcctcagagatgctatttgccttattttgaaaagctttatgaaaataaagcactcacctatgcgaaggcaaccaggcttactaatgtgtcattcttaggcaaaagccaagagcgcatatcatgaagtggtgatcggatgctgattcacagttctgtctggaagccatggatagttctaattaattttaaatggggaaatgtattcaatacttattcacaaatgtagcttgagagacaaacaattaaatgtggcctttacagaagaaaataaggaggtccttagtgagtgaaaatttggaaatcactggcttgaaccaaaaagaggtaccttgtgtaagaatacaaaagatggagtagccggggacagtggttcacacctgtaatcccagcactttgggaggctgagacaggagaatcaattgagcccaagagtttggtactagcctgggcacatggtgaaactctatctctacaaaaaatataaaaattagcagggcgtggtggcacacacctgtaattccagctactggagaggctgaggcaagagggtcacttgagcccaagaggtggaggttacagtgagctgtgatcgtccagcctgggcaacagagtgagactctgtctcaaaaaaaaaaagtggagtaataatgtgactgaacattttccatgtctgtcactgaacatttcagtgacagaacattgcagagcttttcacgtgttatctcccttaattttcccagcaaccctatgataaaaaggtaaaatctccatttgatagagaaggaacgtgaggctcagagaaattcaacattgcctgcaacccaaagctagtcaatggcagaactgggaatagacaccacctgtctgactgcagaaactgccctgagaacctccttattctatcctgcttttcaattctgataaagtgaacatatattaaccacttattatgcagtgatcccctttacattctctgaattaaatatctataatgaaaccaccaccaggaactgtgggagatgctgagacggtagaagacatacatgggccctgcactgaaggagctttcaagcatcttgctggggagacacactttcatgggccctgtgcctggagcaataacaagatcatgagacaggccccatgttgaccaccgtgtctccagtacagaacacgtcacccaacacctagaaacaattatttaatgaatgaatatacgtgcaatagacaacattcggacgtaaactcagtaagcagaaaaacaaataacatcttcctttggttacataaagcatgagaagaggctgttggaagaagacatgcgactatgtcgtttagaattctctctcctctttcccttgcaccccaggggtatcccaggatctctgcctccatgatcccccttcacctgccacctcctttctttgcctttcaggaacaagatcctgatttttgggctcctggaggagacggcgttggctgcctttctctcttactgcccaggcatgggtgtagccctccgcatgtacccgctcaagtgagtgtctctttcgggcggcctgagtagtcatacggggggccttcagccccctccaggatccaagttctgatcgctttgaatgctcctttatgtgacagccaccaagccaacctctgatgctgctgacactctcctccattgctttcagagtcacctggtggttctgcgccttcccctacagcctcctcatcttcatctatgatgaggtccgaaagctcatcctgcggcggtatcctggtggtaagcccctccacattccccccagcaaagtgcaagccccaccaccagctcctccctccaggaccacacgcagactccactcccactactggttcctgcttctgttcctcaacaccctcagatcctggggtcccaggtcccaggagccctgactctttcgaacctgttgtctctgccctcttcccatcagattctaaaccccgcctaactcacagttggtctccgaggccctccaccttccacctgaaaccacagaacatcagaattagaagggcctttccaggtcacctagtcccacgtccatattttacagatagaggaggctcagaggtgaatctgttcagggtcgtaaagcaaagaatagcaggactggtactagaacccaggcctcctgatccccactcatcaaccgacaagttattgtttttcctacaagcgttttttaatcacttagtagaggttaaaatatgatggcttacaaaccaaatactgtccaggaatactgtttggtttgacctgtgccatattttgtgtgtgtggggggaggagggtggattaattggtccgatatagaaaatttagggtctttcacataaaatctgaattcgacttctcctgaagatcagaagagctgttaatcccatgtccacatctctgcacagcaagaatggacagctgctcccttagactctcgttcgtcacctgaagaggccctgtgggcgtttgcattttcaccctcgacctattctgccccagcctccaatgtgctaaatacaagtctcccctaaaggcaggttcaccctcccttcctttaacctatggccccagctcactggacctccttctcctccctttcaccttcttttttttttttttttttttttttttttttgagacggagtctcgctctgtcgcccaaccaggagtgcagtgcagtggcacgatctcggctcactgcaagctccgcctcctgggttcaagcaattctcttgcctcagcctccagagtagctgggattgcaggcgcatgccactatgcccgactaattttttgtatttttagtacagacagggtttcactgggttagccaggagtcttgatctccgcctgcctcagcctcccagtatgctgggattacaggcatgagccactgcacccagcctccttccaccttcctaagccacttcccccagtgcccttcaccaggcttctccttccacctggcttcagcgacccaagcccctaggaaattgatctcttgcctccttttaagctcatgctgcaatctccactcccaatctctctaacaggctgggtggagaaggagacatactactgaccccattggaagaagaaccaggcatggaaagatggggagctctggaggtgttgtggggatggtgatggagagggatggaaataacgggtggcattgggtggcaacatttggggagagataatgaggcaactcagcaggctaagttgcggggtatataaattggggtgatgaccccatagacctaactgtgaacaatcagattagacactatgtgttagagtccccccgaccagatccttttccatcccactccactatgttgtctattttttctgaggaattaagggttaccccaccctgcccactcccatcccttcaaccccacttcctactgtaatagatcagcatccaaaagcaggaacccatctaaaccagaaggaagccctctcagatcaccccagcctcactccatttcccacttccacccccgttagcttcctgcaggactctatccctggcttccccttcagaccttgcaatcacaaaaggttcttctggtgagtgcaagagcctgagactggaaaaggtggacttgtctcccagtcgaggctggtaagggaccttcagggagagctgggcagacaggtgggagatggaggtagggctggctggaggaaggaaacaacaaaggaagtgaggtagtgccaatgacaggacatttgacatgagtctccagatagatgtcgtggactccagctctacgtcccacattttagaataccccaccagcagaacaaactcagatctcatcagggtagcagcagaggcaggaccagaaggcaatcaagagcttccagaaatgccacacttgtgtgccacagagttccccgctgacccttggttaggggtcctcttagtccacaaggtccggatgtcactcatgtacttaataacacttcaccttctgtaatactaagtcctcagagctccatgctgttctgaaagggatggccacaagttctttcccagcctcttccattccctttcttttcatgcccatcccgatgaacctgcatcattccccgacactgccaagccaaccctggaaaaggagttcgctggccattggctagaatcagggtggagaagttccctgaaccttcctgtctcccagggacatgtatgcttccagggacaagcttaggtcatgaacatggtcagaacctttggacaagaggaaaaatactaagagatttgctttttctgggtgcggtggctcatgcctgtaatcccagcactttgggaggccgaggcaggtggatcatgaggtcaggagttcgaggcgagcctggccaacatggtgaaaccctgtctctactaaaagtacaaaaaattagccagtcatggtggcacacgcctgtaatctcagctactcaggaggctgaggcaggagaattgcttgaacctgtgaggaagaggttgcagtgagctgagatcgtgccattacactccagcctgggcgaaagggtgagactccatctcaaaaaaaaaaaaaatgatttgcttttgacgtcttaggtggcagggctgttccctccaggcaaatgcccttcaaaccgacgatcattgtgcccacttaccctgggctggagagttggtttcaggttcctacaggagatagctttctttcccttactccctatctaacacttttgctctgcaggcagccttgcccattctctaagcctggcttagaaggcactgggaatgtcctgtagagagagacctagataggtcatgcaagtgagaaagacatctgaggaaaatggaagacctaaggcagacaggaaggaagcacaaaagacaagcattgggtcagacccataaaccacctcccaaaggctgtcatttcattgcactggaattttgctttatcagaagcaaggaagtaagggagtcattgccttgggcctgggaatctaagtgggagacaatattaatttggatccgattaattggagattactaactgtggacaaaagtttatctttgcacaatcaataaaaatggcatttttttagtaaattaagagcataaacaatattgctagaggtggcatgtttagtctaccaaaaacaatacttttcaggcactttagaaatatccttttagaagcagcgagtgcatgggctaattatcatcaatctttatgtatttgttaaagaaacatctacaggatctttattggtgaccttttgtaagacattagtttgaggtactacctatgtacttgaaaataataaagtggcatttctttatgaaaaaaaaagaaatctcttccataattcagatttctacactttatacttgcctccctcctaaatcgtgatattgaaatatgtgctgtggcagaactcggcttgtagggaaagcaacaaagagatagcaagtgtcagggatgggagggaaatggtctgggagcagatgatgtccgtggagaaagcaagaggggaagaagttaggttgcaaaataacctacaagaaactatagcaggagcctccttcctcatgctgatcccaccctaagagccacaagagtttgtccaggacagggaggggcctgtgagtctattaagaacaagatcctcaggggcacttctgctttttctgttccagaccaaaatcaggccattctctatctgatgggatgggggaaggagatagtgggttgaggagcccaagagtcaacaccaattcacaatctgtacttcatgcagagctttgtcctgggtgctctctttaaggggtgggggtaaagtggatgcaatccttgaaattcacctgagtagtagacatcagaaaccatcatggacagaatgtaatgagcagtaggggggacgcttgtgtgctggagatggaggggtgggtgggtgggtgtgcattgctccaggggggccctgggaatgggagagagaaagacaccaactcttacaacctatgccaggatttcagaataaaggtcagaagtcaattcttgcccaagccatattgcagcccctttattatgactcttaacagtgtcattaatgacagttatagttagtagtgattataagagccttaatcacagctcattttgtgccataactatgccaaaattttatttgtatagtctccgttcatcccaccacagggcctttattcttgatggtccctctgccaggaacacttttccctagttattcacatgcctggctttgtcacttcattcagatcactccttaaacatcagtaagatcctcacagaggacctcaaataaaatgacttcctggaacctctttctctgttctcttcatttttgttcataaatacttattaccttaaatttagatagaaagacagctagatgtaatatttagaaagatatacatgtattttgttgctgtttatgcttttgtttgtctgactcctccagtataagttccatgaagacagagactctatttcttttgttcaacacctttatccttagcacctaaaacatctgacacacgttagacaattaataaatatgtgttggatgactgaaaggatcctcacagtaattcagtaagatggagactattattatctccaatttacagatgagaaaactggtgctcagaaagttaaattattattcaaagtttcaaaggtagtaagcatctgaagcaggattcaaacctaggccagtctgactccagggcctgccctcttaaccatgccatgctctgcaactgcaagaacagaaagcctatgtgcatggacagagcctgactagcccaatggctcagtgaactggggaggctgccaagggagccaggaatttgtggacaattaacatttgagcagcaggggcaaggcagatccgtgagaaagggagaagatatgatctcaaagatgcggtagggggttaagaaaaagatccaggccaggcacagtggctaacgcctgtaatcccagcactttgagaagccaaggtgggcagatcacttgaggtcaggagttcgagaccatcctggccaacatggtgaaaccctgtcttccactaaaaatacaaaaattagccgggtatacacctgtaatcccagctactcaggaggctgaagtagaagaatggcttgaacccaggaggcagaggctgcagtgagccgagattgtgccactatactccagcctgggtgacagagcaagacttcatctcagaaaaaaaaaaaaaagaaagaaagaaaagaaaagaaagaaagaaaaagatccaaagagatttgatggtctgctagaggattttagcaaaaagaagaatcttactattgaatgtaatctgagaagctaaggccaacttttgacccaggcagaaagtctttccatggcattttctttttatctacagaataggaaatgtgatcatgcatcagagataatcagagatagtcactaaatattcataatgctaagaacgcagcaaaaaataggaagaaagtggttagatcaatatcaaaggaagacatttaatacaaagtgagtctttcaaaaatatccttggctccagtgaattcaatgaaggattttttgcaaattcctcaaagaatttccttatattatttaaaatgtgctggaatataaaaaattattttgtgttttgtgttgcccagcctattttatgagataagtactattttgttaaaattttatatttaatatagataataaattgactaccccaaatggtggaatgcaaggatagcatattacaaggaaaatgttacaaacaactaacattaactagacaaaggatgaaataatcatttcaaaaaaggttgaggaggctatcagtaaaattcagtatctattactgataaaaatgttggaggaaaaagtgtatcagaaaatataatcatgggccagtcgcggtggctcacgcctgtaatcctagcactttgggaggccgaggtaggtgggtcacctgaggtcaggagtttgagaccagcctggccaacgtagtgaaaccttgtctctactaaaaatgcaaaaatttgcgcgtggtggcacgcgcgcctgtaatcccaactactcgggtggctgaggaaggagaatcacttgaacccggaaggcataggttgcaatgagctgagatcccgccattgcacctccagtctggggtacaagagtgaaactcggtctcaaaaaaaaagaaaatgtaatcatgttcagagaagagaggaaaggatgtagtaagtctagaaaaccaataacagcaactataacaaataattgcaataaaacatttgaaatcctcgataagcagtttgtgtttaaaagttctacaaaggccgagcgcggtggctcacgtctgtaatcccagcactttgggaagctgaggtgggcggatctcttgaggtcaggagtttgagaccagcctggccaacatggtgaaaccccgtctctactaaaaatacaaaaaaaaaattagccaggcatggtggcgggtgcctgtaatcccagctacttgagatgctgaggtttgagaatcacttgaatccaggaggcagaggttgcaatgaaccgagatggtgccacagcaccccagcctgggcaacagagactccatctcaaaaaaaaaaagttctaaataagccaggtgctatggttcacgtctacaaccccagcactttgggaagctgacgcaggaggattgcttgagcccaggaatttgagaccagcctgggcaacacagtgagacctcatctctattaaaaaaaaaaaaaaaaaaattagcctggggtggtggcccacacctatggtcccagtcacttgggaggctgagggaggaggatcgcttgagtctgagaggttgaagctgcaatgagccatggttggaccactgcactccagcctgggtaacagagcaagactctgtttcaaaaaataaaaataaataaataaaaattctaaataaataaaactttgtttttagcgagcataactccctaaaaatccaagaaattcagccaaaacaaagcaacagcatcaataacaaaaaaaatcctagaagcaataaattcaaagttacagggtatatgggtatcagttttcaaagaagcaaatgtatccctaaatattagggagacagaaaatacagcataaagagcttctatttacaatagaatgaaaacaaattacgctcaaggtttactgtgtgcagcacatagtaactattaaagaaaatttaaaagtacaatgagaaaaataaaaaaacatgaattcatggaaagctaaacttgactgccatttgggaaggcagaacgtagtaaagataaaaataagttactatgaaagagtcaattcaatatcaattaaaatcctcgctgcatttttataaaacatgacatattggttgtgacattcagctgcaagagtaatcaggcaagaatctcagaggttttttctaagtaattatgaagcaaatgaatagatcactgatgctaacatatttaccccaacagattttaaaacacatcagaccactggccgggcgcggtggctcacgcctgtaatcccagcactttgggaggccaaggtcggcagatcaagaggtcgggagttcaagaccagcctggccaacatagtgaaaccctgtctttactaaaaatacaaaaattagccagacatggtggcgcatgtctgtagtcccagctactcaggaggctgaggcaggagaatcgcttgaacccggtaggtggaggttgcagtgagctgagattgcaccactgcactccagtttgggcaacagagtgagacttcatctcaaaaaaaaaaaaaaaatcagaccaaagtggcaattatcaaaaccttgtagcattaagataaaacctgaaaactcattagtcattcaacatctattcagggactatttgtggaccagctgccctgtgccaagcactatcctaggagccaggtatatagctgtggaaaaaaacagggaaggtccctagggtcatggagaaccagacaagtcaacaagacaagtcaatcagacaagtcaacagttaacaggcaggataatttcagagggagagaagtgttgtgaagatcaaaagtgatagagagagggctggcgccggaggggctgttttggatttaactatgagagaaggcctctccgaagaggtggacttttgagctaagatctctagaacaaaatgaggtttctaaaaataatttcaattgattgtatctccataaagttgcttttgggcaatgcccatctgcaagactgagctaagtgttattgtcacatagatgatgcatagaaaaacatatgaattttaactttaattctaaccttcttcttaagaattttatgttcatctacattaaacacaaagactgggagaaaacatttgtgttatatatgacaagggtttcctacaaatcaatataaaaaagaaaacaatggaaaattgggcaaattgtaagaatgacaatttacaaaataaataaataaagtccaagaccaggcatggtggctcatgcctgtaatcccagcactttgggatgcccaggcgggcggatcacccaaggtcaggagttcaagatcagcctggccaacatggcaaaaccccatctctactaaaaaatacaaaaaaatcagctgggtatggtggcgtgtgcctgtagtctcagctacttagaaggctgaggcacgagaatcgcttgaacacaggtggtggaggttgcagtgagctgagattgcaccgctgcactccagcctgtcaaaagaaagaaagagagaaagaaaggaaggaagaaaggaaagagagaaagaaagaaaagaagaaatgaaagaaagaaagaaaaccagaaagccagtaaacataagagaaaatgctcacattgacaatttaaaaatgcaaattaaaactacaatatatcaaagttcactgattataatagtaaaaatcaaggtcatctagcataatcaaaggtgtggaaggcagacattcttgcatcctgttgttgggatgcagatagataaacacttttaaagaccaattggcagaatcttttaagattgttaatgagtgtactctatgattcagcaacaggaactgattctacagaaatagaagctcaagggcctgatgatatctatgtgcaagaatgacactctagcaattttattaatggttaaaaaaatggaaaatatctcataaatccatcagtaatgggaatgattgaatagagcatggtcaatacagaatatggaagcctcacagcactgaaaaaaagaagctttatgtacatgacaggttggtagagagttgaatgattgtttaaaagttgaaaaatacctccttttagatatctatttgtataaacatagaaaaaagactggaaggacatgcagcacattgttaccagcagtaacttcagcagtggggagaatctgagtttggagggagggaaggtggggctttcaatttttatcttaaacatttttaatagagaagaaaaatccaatctgttaaagaaatagacgatcatttatcccagctgggaagggagcatttctatttctgaatattcaaggaggattgcatcagcaccaagatgaatgtttccagatacagtcatatttttaaaaagcatgcccaaccaaaatgcaattaaataaatatcaggccaggcttggtgtctcacttatgtaatcccaacattttaggaggccaaggccaaggattgcttgagcccaggagtttgagaccagcctgggcaacacaggggcaccccgtctttactaaaataaaataaaataaattagccgggcatggtggcacatgcctgtggtcccagctacttgggaggctgaggtgggaggatcacttggacctgggaggttgaggctggagtaagccataattgcaccattacactccagcctgggcaacaaagtgagatcctgtctcaaaaagtaaataaacaaatatcaaacaacagaatgggaaaatctatgtgacgtgcataattgaaaaatatatataatggttgacagaaaagtatagatgcttcagattattcttggaaggaggtagaatcctatggacatgcaaaacatatatacagttaatatagtcaaagcacttactgagacaccagagaaggtcaatggaagaggtaagtacatcattttaaaatgagaaaatgcaacgctatcacatggaaaagcatatttttaccctcactgagaagagctgcatattaatccacaaataaaactactactgaattcaagctacctattgagcacatactatatatgtcacatagtgctttttgtagagcacctcacttaaggtagaaggtatcctcttttaaaaataagaaaagagaggtacagaggttaggtaacttgctcaaagccacacagctgacaagtggaggagttgggattgaaatccaggactggttccagagcccaagatctgatctattctgctagctgatctcctaaaattaaaagatcaaacccaatgttagtggaaaagtgtgccttgctaaaaaacacacacagagtacctgctttttttttttttttgagatggagtctcaaaaacagacgggagaatattagtccaaactgcaactgcaccattttgtaagctccctgctatggttttttgtttgtttgtttgtttgtttgtttgtttgtttgtctgagatggagtcactctgtcaccgaggctggagtgcagtgatgcaatctcaattcactgcaacctctgccttctggattcagatgtttctcctgcctcagcctcccgagcagctgggattacaggtgcccaccaccacacctggctaaattttgtatttttagtagagatggggtttcaccatactggccacgaaggtctcgatctcagcctcccaaagtgctgggattacaggcatgagccaccgcgcccggccgaatacccgctttatttttgagtcatctatttggcatacctctaagcctccaaagtctgcaggaccacacaagaactttgttctagttctgccctcagactgaaactctttctgtagcagggcctgctccaatcgtcctcaaacccaaagactgagacttctaggttcttggttaaaaccttcatgaggcctttgcgacagcagacctggaccatcgccaaggcaagacttctggattcttggttagaactttcaggaggcctttgtgatgccagacctgggtcattgccccagcaaccacagggcctgggactggggggttcccagatccttgaagctcactccgcctcctcactctcactgcatttcccaccttcctgtgggccttgcggcatcttcatcactgaggcacctggttacgcttcacctcttgtttcctgccctcactgcattccctcacctctacctttttatccttccaccctaggcttctctcctccctcttccctcactcctgactcttcctcttcccagcggacggctggaggaccgctcagtctctcctctctcacttcccttcctctctctcaccttcaccacccaacacctccctccctgcctctttctttctgctccctcattctctccccaccactctcttctcgtggcccccttgcccgcgcgccctcttcccttccccttgcctcactctctcagctttcttcccacagttgagctcgggcagctctttctggggatagctatggggctttgggggaagaaagggacagtggctccccatgaccagagtccaagacgaagacctaaaaaagggcttatcaagaaaaaaatggtgaagagggaaaaacagaagcgcaatatggaggaactgaagaaggaagtggtcatggtgaggccacccaaagtgggcgctgacagctgccctctgaaaacactcctccacctatctttaacatcttaccttgagaatgaaacacacaggccagagccacatctcttctctgttaggctttggagggaaggagagggttaaaaaaaaaaaaaaagatacacacagagagacagggcagctcaacagcaagcacaggtatattgcagacacctgtggaagtgggggatcagcttaattccacagtccactgccacttacaggctgggtacttatagggatggatgggaggagtctgggctgtatggcctgctgcctggcaggatatcgataagatgttctcatgatgaggtgatttttggcccttgtttccacagaatataatcatggtattccctggacctttgcccagcaggatgtgatagggatgtttctttagtggggtctttgtctttaattgggccttcgtctgccctgtggtcaggtggttaggcaggctgtttctctggcccgaacccccgtgaaatgtttcactttgaccaaggcctgtaaaatagtggggagctaggccgggcgtggtggctcacacctgtaatcccagcactttgggaggctgaggcaggcagatcacctgaggtcaggagtttgagacaagcctggccaacatggtgaaaccccgcctctaaaaatacaaaaattagctggtcctggtgatgggcccctgtaatcccagctgcttgggaggctgaggcaggagaaacacctgttgggaggcagaggttgcagtgagtcgaaatcgcaccactgtacaccagcctgggcaacagagtgactccatctcaaaaaaagaattgcagggagcttacaaaatggagcagtctcagtttggactaacattctccagtctgtttctccccctctccctggaaatgacctgggccaccccctgtccctcaatgcctctactgtcccctcaggatgatcacaaattaaccttggaagagctgagcaccaagtactccgtggacctgacaaaggtgagtaagaagctccctgaggaggcagagagtctccaactctgactgtgaggctgccaggacaaaagctgaactaggaatccagccccctaacttcaagtccaacgttcccacccctcaccctctgcctggccacgttccatggacactacctggaaaaagctgcaaatggtaactaccctcaaagagagtgtgggactagataagagaataagaatgctttagggcagtgctggtcaaacgtcttgtccttaggtctcctttacactcttagaatttatctaggaccgcaaagaacttgtgcttatgtggcttaagtctgtctatatttaccatattagaaattaaaattgagagttttaaaatgtatttctcaattcatttaaaaataacaaaaataaagttatcatatattcatatatgttttgacaaataactgtatttttc

SEQ ID NO: 809 - DNA, 5510 bp, Homo sapiens
tctctgtctgccagggtctccgactgtcccagacgggctggtgtgggcttgggatcctcctggtgacctctcccgctaaggtccctcagccactctgccccaagatgggccgtggggctggccgtgagtactcacctgccgccaccacggcagagaatgggggcggcaagaagaaacagaaggagaaggaactggatgagctgaagaaggaggtggcaatggatgaccacaagctgtccttggatgagctgggccgcaaataccaagtggacctgtccaagggcctcaccaaccagcgggctcaggacgttctggctcgagatgggcccaacgccctcacaccacctcccacaacccctgagtgggtcaagttctgccgtcagcttttcggggggttctccatcctgctgtggattggggctatcctctgcttcctggcctacggcatccaggctgccatggaggatgaaccatccaacgacaatctatatctgggtgtggtgctggcagctgtggtcattgtcactggctgcttctcctactaccaggaggccaagagctccaagatcatggattccttcaagaacatggtacctcagcaagcccttgtgatccgggagggagagaagatgcagatcaacgcagaggaagtggtggtgggagacctggtggaggtgaagggtggagaccgcgtccctgctgacctccggatcatctcttctcatggctgtaaggtggataactcatccttaacaggagagtcggagccccagacccgctcccccgagttcacccatgagaaccccctggagacccgcaatatctgtttcttctccaccaactgtgttgaaggcactgccaggggcattgtgattgccacaggagaccggacggtgatgggccgcatagctactctcgcctcaggcctggaggttgggcggacacccatagcaatggagattgaacacttcatccagctgatcacaggggtcgctgtattcctgggggtctccttcttcgtgctctccctcatcctgggctacagctggctggaggcagtcatcttcctcatcggcatcatagtggccaacgtgcctgaggggcttctggccactgtcactgtgtgcctgaccctgacagccaagcgcatggcacggaagaactgcctggtgaagaacctggaggcggtggagacgctgggctccacgtccaccatctgctcggacaagacgggcaccctcacccagaaccgcatgaccgtcgcccacatgtggttcgacaaccaaatccatgaggctgacaccaccgaagatcagtctggggccacttttgacaaacgatcccctacgtggacggccctgtctcgaattgctggtctctgcaaccgcgccgtcttcaaggcaggacaggagaacatctccgtgtctaagcgggacacagctggtgatgcctctgagtcagctctgctcaagtgcattgagctctcctgtggctcagtgaggaaaatgagagacagaaaccccaaggtggcagagattcctttcaactctaccaacaagtaccagctgtctatccacgagcgagaagacagcccccagagccacgtgctggtgatgaagggggccccagagcgcattctggaccggtgctccaccatcctggtgcagggcaaggagatcccgctcgacaaggagatgcaagatgcctttcaaaatgcctacatggagctggggggacttggggagcgtgtgctgggattctgtcaactgaatctgccatctggaaagtttcctcggggcttcaaattcgacacggatgagctgaactttcccacggagaagctttgctttgtggggctcatgtctatgattgaccctccccgggctgctgtgccagatgctgtgggcaagtgccgaagcgcaggcatcaaggtgatcatggtaaccggggatcaccctatcacagccaaggccattgccaaaggcgtgggcatcatatcagagggtaacgagactgtggaggacattgcagcccggctcaacattcccatgagtcaagtcaaccccagagaagccaaggcatgcgtggtgcacggctctgacctgaaggacatgacatcggagcagctcgatgagatcctcaagaaccacacagagatcgtctttgctcgaacgtctccccagcagaagctcatcattgtggagggatgtcagaggcagggagccattgtggccgtgacgggtgacggggtgaacgactcccctgcattgaagaaggctgacattggcattgccatgggcatctctggctctgacgtctctaagcaggcagccgacatgatcctgctggatgacaactttgcctccatcgtcacgggggtggaggagggccgcctgatctttgacaacttgaagaaatccatcgcctacaccctgaccagcaacatccccgagatcacccccttcctgctgttcatcattgccaacatccccctacctctgggcactgtgaccatcctttgcattgacctgggcacagatatggtccctgccatctccttggcctatgaggcagctgagagtgatatcatgaagcggcagccacgaaactcccagacggacaagctggtgaatgagaggctcatcagcatggcctacggacagatcgggatgatccaggcactgggtggcttcttcacctactttgtgatcctggcagagaacggtttcctgccatcacggctactgggaatccgcctcgactgggatgaccggaccatgaatgatctggaggacagctatggacaggagtggacctatgagcagcggaaggtggtggagttcacgtgccacacggcattctttgccagcatcgtggtggtgcagtgggctgacctcatcatctgcaagacccgccgcaactcagtcttccagcagggcatgaagaacaagatcctgatttttgggctcctggaggagacggcgttggctgcctttctctcttactgcccaggcatgggtgtagccctccgcatgtacccgctcaaagtcacctggtggttctgcgccttcccctacagcctcctcatcttcatctatgatgaggtccgaaagctcatcctgcggcggtatcctggtggctgggtggagaaggagacatactactgaccccattggaagaagaaccaggcatggaaagatggggagctctggaggtgttgtggggatggtgatggagagggatggaaataacgggtggcattgggtggcaacatttggggagagataatgaggcaactcagcaggctaagttgcggggtatataaattggggtgatgaccccatagacctaactgtgaacaatcagattagacactatgtgttagagtccccccgaccagatccttttccatcccactccactatgttgtctattttttctgaggaattaagggttaccccaccctgcccactcccatcccttcaaccccacttcctactgtaatagatcagcatccaaaagcaggaacccatctaaaccagaaggaagccctctcagatcaccccagcctcactccatttcccacttccacccccgttagcttcctgcaggactctatccctggcttccccttcagaccttgcaatcacaaaaggttcttctggtgagtgcaagagcctgagactggaaaaggtggacttgtctcccagtcgaggctggtaagggaccttcagggagagctgggcagacaggtgggagatggaggtagggctggctggaggaaggaaacaacaaaggaagtgaggtagtgccaatgacaggacatttgacatgagtctccagatagatgtcgtggactccagctctacgtcccacattttagaataccccaccagcagaacaaactcagatctcatcagggtagcagcagaggcaggaccagaaggcaatcaagagcttccagaaatgccacacttgtgtgccacagagttccccgctgacccttggttaggggtcctcttagtccacaaggtccggatgtcactcatgtacttaataacacttcaccttctgtaatactaagtcctcagagctccatgctgttctgaaagggatggccacaagttctttcccagcctcttccattccctttcttttcatgcccatcccgatgaacctgcatcattccccgacactgccaagccaaccctggaaaaggagttcgctggccattggctagaatcagggtggagaagttccctgaaccttcctgtctcccagggacatgtatgcttccagggacaagcttaggtcatgaacatggtcagaacctttggacaagaggaaaaatactaagagatttgctttttctgggtgcggtggctcatgcctgtaatcccagcactttgggaggccgaggcaggtggatcatgaggtcaggagttcgaggcgagcctggccaacatggtgaaaccctgtctctactaaaagtacaaaaaattagccagtcatggtggcacacgcctgtaatctcagctactcaggaggctgaggcaggagaattgcttgaacctgtgaggaagaggttgcagtgagctgagatcgtgccattacactccagcctgggcgaaagggtgagactccatctcaaaaaaaaaaaaaatgatttgcttttgacgtcttaggtggcagggctgttccctccaggcaaatgcccttcaaaccgacgatcattgtgcccacttaccctgggctggagagttggtttcaggttcctacaggagatagctttctttcccttactccctatctaacacttttgctctgcaggcagccttgcccattctctaagcctggcttagaaggcactgggaatgtcctgtagagagagacctagataggtcatgcaagtgagaaagacatctgaggaaaatggaagacctaaggcagacaggaaggaagcacaaaagacaagcattgggtcagacccataaaccacctcccaaaggctgtcatttcattgcactggaattttgctttatcagaagcaaggaagtaagggagtcattgccttgggcctgggaatctaagtgggagacaatattaatttggatccgattaattggagattactaactgtggacaaaagtttatctttgcacaatcaataaaaatggcatttttttagtaaattaagagcataaacaatattgctagaggtggcatgtttagtctaccaaaaacaatacttttcaggcactttagaaatatccttttagaagcagcgagtgcatgggctaattatcatcaatctttatgtatttgttaaagaaacatctacaggatctttattggtgaccttttgtaagacattagtttgaggtactacctatgtacttgaaaataataaagtggcatttctttatgaaaaaaaaagaaatctcttccataattcagatttctacactttatacttgcctccctcctaaatcgtgatattgaaatatgtg

SEQ ID NO: 810 - protein, 1048 aa, Homo sapiens
SVCQGLRLSQTGWCGLGILLVTSPAKVPQPLCPKMGRGAGREYSPAATTAENGGGKKKQKEKELDELKKEVAMDDHKLSLDELGRKYQVDLSKGLTNQRAQDVLARDGPNALTPPPTTPEWVKFCRQLFGGFSILLWIGAILCFLAYGIQAAMEDEPSNDNLYLGVVLAAVVIVTGCFSYYQEAKSSKIMDSFKNMVPQQALVIREGEKMQINAEEVVVGDLVEVKGGDRVPADLRIISSHGCKVDNSSLTGESEPQTRSPEFTHENPLETRNICFFSTNCVEGTRIVIATGDRTVMGRIATLASGLEVGRTPIAMEIEHFIQLITGVAVFLGVSFFVLSLILGYSWLEAVIFLIGIIVANVPEGLLATVTVCLTLTAKRMARKNCLVKNLEAVETLGSTSTICSDKTGTLTQNRMTVAHMWFDNQIHEADTTEDQSGATFDKRSPTWTALSRIAGLCNRAVFKAGQENISVSKRDTAGDASESALLKCIELSCGSVRKMRDRNPKVAEIPFNSTNKYQLSIHEREDSPQSHVLVMKGAPERILDRCSTILVQGKEIPLDKEMQDAFQNAYMELGGLGERVLGFCQLNLPSGKFPRGFKFDTDELNFPTEKLCFVGLMSMIDPPRAAVPDAVGKCRSAGIKVIMVTGDHPITAKAIAKGVGIISEGNETVEDIAARLNIPMSQVNPREAKACVVHGSDLKDMTSEQLDEILKNHTEIVFARTSPQQKLIIVEGCQRQGAIVAVTGDGVNDSPALKKADIGIAMGISGSDVSKQAADMILLDDNFASIVTGVEEGRLIFDNLKKSIAYTLTSNIPEITPFLLFIIANIPLPLGTVTILCIDLGTDMVPAISLAYEAAESDIMKRQPRNSQTDKLVNERLISMAYGQIGMIQALGGFFTYFVILAENGFLPSRLLGIRLDWDDRTMNDLEDSYGQEWTYEQRKVVEFTCHTAFFASIVVVQWADLIICKTRRNSVFQQGMKNKILIFGLLEETAAFLSYCPGMGVRMYPLKVTWWFCAFPYSLLIFIYDEVRKLILRRYPGGWVEKETYY

SEQ ID NO: 811 - DNA, 27901 bp, Mus musculus
tggggtgaaaaattagttgggagactagaaggcccaggatggccttaattaatgtctcctttcttcctagctctccgctcacattccctcagactgtagtggcctggctccaggtcacagatgtagctgtcccaggcctgctactacctcagtttccccactgaagtacagggactgtgtgggttttcttctcttttccctgatattggttctcctggcttcctcgtgggtctctcttttcagtgtacttggtgtagcttctaaaagttcttttccttggactctcctgccgtccgccatctttaatcccctcccccatggtgttcttgtcctttttttgattattcaaaatacattgtttagaattgggaaaagagaaagataaaggcactgagaagcggcctcctggtctcctgcatcctaacccattatctctttgctttccttgcttctctggatccagaaaggtctgcattggattcccatccaatgggacacacaggtcggggtgttaaggatattgaaaaagaaaagatttttgtgtctgctgtcttgggctcagtggtgcacctgcctttcctggggcctgagtcatggactggtgcggtgcacacttgcctaaaagtcaggtcccagtggtgctactggccacttggatgaccttgggcaggctgtcacctattttgtctcccgggtgacaaggggtgccagaaagcctgtgagatctcctttcacctctggcgctccccaaactctgggctacttcctcttactcatgcctagctcaggggagcagtagcctgcagttcccctgggctgagaggagacaagggggcagttgttcctgcccagccttgttagtaggtacaggtgtgtctatttcaattaatgtgagtataggaaatgagtctgaaccctttagctcttggcatagaaacaaaggaaggcctgtttggttttggttttgttttattagcaaagatgacctctatattttacacagagccaccatggaggtgggcagggtctgggtatccttttggactagggatcctggcatctcttgggtggtattcagggaacatataacaggtgagcctgtctttggagatcttttggactgtggcgatatgaggtgtcagggaggagagggttaatggggcttgctgagtttgggggcaggggtcacagctgggccctgcagggttcctgtttgcctttgattccatctgtgtggggaaggaatggtcccccagccccctgaggtaggtttgctttggctgaggatctgacccagccgctggcccagagcttccccaccctcccattcctcctatcaaggggcagcctggcctggcccctagcctcctccttcctgcctgcctccttcttcccttaccatgcccttcctcctcagccagcatcgagttccgtttttctgcttgtcccctttggcattctgtatgcccaacaaggacagggcgccctgtaaacatctggcacgccgagccatggcctctgtcctatgtaacgcacttccagagttctagggaggttgacctcctctttgcctcagtttctcttagagtccaggatcttatccctagaggaatatggcgtaatcagcagtgtgtgctccttgtgatgctatcgagccactgagacattcagtctgtacttgttgagaccttactgtatgccccattctgggccagtactggaaagaccaccataaccccgagtcacggttcccacacttacagtccttttgcttcgcaccccagcctccaaacccctccaccccattctttgaccctacttccccagagtgggtactgagcctttgagatttctccatttccttaatcttcctgcaacttctccactgactggctaagtgaaggattctcatcctagctttaagtttaggtgccaggcctggaccttaccccaaggttcccactagacgtggcatctgtccgtaccctgacattggatcctccagactccgaaactaaagacgacgcatgttaatttagttctcgtaccaactctgctttacagatagggaaactgaggcacccaatcaagtgggggatctgggactcagacctagtctatttggctctaggggctgcaatggtaacaagaaagagcacagatgataaaggggagggaaagagaacaacagcgctctgtgagctaggcgctaatgcctgctgattgcacatggttagactagaaggtgatatcagctccaagatgagagagatgatgctcagccggaagaatcaagaaggtcttcacggaggaggtggccttttaattgagtcttgatagataggagagatctggctccgtgagacggaaccctgtaggttcgggacatcaggggctgcagtagcatccagagtatagaggagaatgtgaagtcaatctgggaagtggatacagagagcctcgaatgtcagactaagtgttatcctaaatgccagcattctgttaaaaaaaaaaaaagaagaagaaggaaaataaaaacctgtgatgctaaaagtcacctggatacgtgttaaaaatacagaacagtggggccaggctcaaagattctgattcatgagggcgggggtggggagtgggagtctgtatttttaccaccgagaaagtttgagaaatattgctataaacaatatggagacatttaaagtttctgaagaaagaaatcatctcattcaaattgtaccctgggtaagactcctttgattgaaggggggggggtgtgtgcgcacgcaagcgcatgggtgtgaggtgtggggctggaaggaagagataggagctatcagggagagggtgtggcaggagaggaggtgggggggaacagcagaggtgagcattcaggactccgtagctggttgcttgccagggcaggggaggaaagacttgtggagtgggggtgttgcgcagctctgactgttatgaagttgggaaacaagctatcacatccctgcggtgggttgtgaggctgaggtgttgtgtgtggtcaggctgcaggaggggcttcttgaatagatgagacaggactggacctccgcagggagcatgggctgtggaagtcacctgcatagagatgaccatggaggcagaggtcactaaggtgggggaatctggaggacaaatggcaagagtcttaggaagaaatgtgttcaatacttaagccaaagatgagcctagaccagcggctctcaacctgtgggtcataacccctgtgtggctagaaagaccttttcatggaagtcacacatcagctatcctgcatatcggagatttacattctgtctcatgacactagcgactttacagttgcgaagtagcaaggggcataattttatggttgggggtcaccacagcatgaggaattgtattaaagggttgcaacattaggaaggttgagaacaactggtctagaagatggtgaggtagagaagccagaaagattgagagagctagatcaagctaaggacctagagttgagagaggaactgttataagagcataagaaagaactctaaaagccaagttccagttgacaaagggaaatgaggctggttacttctttttttttttttttttttttttttttacctcagacacctctgaggtgactgttgtgacctctaaggaagccatcttcatggcaggtcaaacctggaaacaacaatctcccttcccccccccccccccccccattccacactaacagggcatgtggtgaggaagctggaggctgaagcaggccaccttctttcaagaagattgctttaggaaatagaaaggaaagaagacagtgggtaactgaggagggggtgtgagggatgcggggctagggtcctgtgtggaggactctcttctcctgttcgctgggcctaccccactgcccatgtgccacagcgctcaccataacttatcttcctgacaatgaccaggaaacagtgaggtcagtgcggccatggctcccattatagaaataatggaactgaagttagggacagtgccccctggctgtgagaaccaggtctgcccaaagccttactgtctagccccgacataccagccccacctactcagaccatacattttatgtttgttttggttggccccttcatcccaagaacatcaagaggtagggtcctctgtgccaacacacagtgccaatgtagagtggctggttctccttcttggtgttccctgtcaccatggctggcagctggtcacacctccatacccatgtcatgccccagacaccagttttgtgtccacaaatggagtcagaatgcctagaaagtaaatctcagactgaccactaattggacagaaggtttcctgaacacatttacccagtcactaactctgcgtgcagggcaaaaatgcttaaggaacatagattattactttctgccctcgatctccaaggtcctagcctttggggtgcaatttctctttcactggatgtggtctccagcaccttccctctttggagcacagagcctgcccttgctaggttgcccaggaagcggtgtggcttgatttttgagcgacagatgtttgagttctgaaataggaaactttcatgtgtgggtggaagtggtcagggcgagatagaatcagagatcagaggaaacagaagtgtccaccatggaggccatggggtaaccagagagaaaagactgatttcctctactcactccctgccctcacacacacacacacacacacacacacacacacacacacacacagaggaggaggaagaagaggaggaggaggaagaggaggaagaggaggaataattagaattggcagtggccttgagaagctcagtcaaaataagaaggcagattgaaacaagctctgtatatacagttcaatgtggaaaatgccatccgagggccaacggcagatgttgtgagtgcgtgtagaaatgtgtgtgcgcatgcgtgcgtgtgtgcgtgtgtgtgtgtgtgtgcgcgtgtgcatgtgtgtatacgtgtgtgtgtgtgtgtgtctgggtattgaggattgtcttaccatcgggacccagctcccactcgctcccatggccagcactctcacccccactgctccatctgtttctttgtttttgcagtttttatttctggctttgtttttccgttactttcctaatagagagcctttggaaaaattccatccttgtttcagttggaccaagcaaaaagggaattgtccactcttcagccagaatagccaaggggtactggcctccttcggagtccaggtggacaagtggacaggcaaggactgatgggaaagaggccgaggaagacgctcagctgagaccagggaggtctaagcaggagcatcagagcttgggtgagctggctgggcaggctgtgcatcccacaccaccccttgcacctccctgccttctgttctggttagaggggagaacagagaagcccttccatgctggggtgctttggagctgggtctcaaagctctttcctcgtctgggaggctgtgaggagctgagaccccagagtcagacgtctttggcgtgtgtacatgaaacctgttcttctctctttccctcaaagtcccagcacacagctctcattgtttcctcttatccgggacctctagcactgcactggcttattcaagaaatacttatagaacacctactgtgtgctacatacaccataccacatatatcacatacactacacacacacatacacatataccacatcacacaccacacatacatcacacacacacacacacacacacagagacaccacattacacaccgcacatacatctcacacacacacatacatataccacaccacaccacaaccatacatacatcacacacacaccccaacccctttacactatatatacacacacaccgcacgcatattcacacacactgaatgtatgcaggtcaccatacaggagaggagacatgttcaggacatttaggctcatttgcctgtgagcgttcctgtttatttgctatgcaaacttgggtaaattgcacaaggtctctgctcccgcttcctggctgtaacatggagggaggtaagcacagctcttagcttccaaggctgtggcgaggactgaatgagcaagcctagtgtgtacacagcgcccaacacaaagccgcctttcagtcagcccagcgtttgttcctcacctcactcagctggaggcagtcaaacccgtaaatgacctgttcttcaaatttgcctcttgctcaacctggtgactcagaagcagtcacctggtgctaaccacctcttgcccccgaggctcaactaacacccagtccgcagagctgtctactggactgctatttcctgacttcattgaggcctactctgctcgggatctcacagagagtgagagtgaggcctgcttttgctctttgacaccctccagttgggattctaaaccagcgggtccctctcagctggctggggacagagcacaagtccagggagcctgggggggtggggagtgggtggtgggggtggtgggtggaacccagatacctacaccatagggctaatgaactcaggccttggcagggtagaaagctgagggggattccagctcagagggatccatgagtagcattccaaagtgggcagcagctggcattcactctgggagaagcaatggctaggcccactcagtgggtcagaaccaggtcatgccaaggcccaagtagtatagtggctcctctattcttgaacaactgtgctgcccgcttggcactgggcttgagaactagaagtgtgagctctgtcagggcaagaggagggaccaggggacacacacacacacacacacacacacacacacacagagagggagagagagagagggagagggagagagagagagagagagagagagagagagtataaggctttacacaacttgctcaggggagaaagaagtggtggagtgtgcttggggggccactttgtgggaatgtgtctgggtgtgtttgatgcttgcatgtttgtgcttgcttacacacctgcttcatcccctgcgtgaagttgtggtccaggtgatgggtagggtttttctcttcctttgactctgaccctttctgtaaccgctcaacaattcagcagagagaacttccccttcggttcatcagttcatccaggtgaaggctttgtaaacacacacagacacaagacattcttgtgtgggatcttaggctccctccgagctggactttacacatactaaggaggcaggggataccataccattatgtgtgtgtttgtgtcgttttcttattagcttagtggctggtgtgcttgtcagtgtgtctctatagctgtgtgtgtgtgtgtgtgtgtgtgtgtgtgctgggcttatatttcttttctctttctttctgtgatatttgctttcaccacgcaacaggctagaggatcctagctcaaatctgaatttggactccaagaaatccaacactggacagcgagtctaacacgccttaggtcctccatgcctcggtttctatagagatgagaagtgctaacctcacaggttctgggaaaacgaaatcagctcacgttacagagcctgcacagggcagaacacgtcacctcaacagtcttgtctttgaacatgcttctctctgaggggcattgttctcttgctgtgactatagcatatgacatttcagccagattataactgtttcagggaaggccttgggtcttaattacctctaacgatactcatgacaccttactgtcatctagatgcttcatacacatgccatctggaggctgaatgttgttaaataaccacatggaatgagactggtgactgaagtctgcccacatgtggcagtacgtggaactgtgggtggggatctggtttgatggtcacaacagtgtccacgtctctacagtctcaggcttcctctcaatccatgctttagtctaatcttaagtctgcctggaaaggtctcttcctttttgcctcactccaccccagaacgccagtttccatactgcataagtctgtgtgagtgtggggtgtcctccagtctttgacgttgatctggccctcctttgccgcatgtgcgtgtgtttgagcattgccccgctgggtgtgtgcgcaacacctttctgtgtgaagccccttggtttcagtggggagccatgtgcctgcatgtggtgagcctcgtgcctggcgtttactcccctcccccaactttccaagttacataagcatcttaggagtgagacagtcctggactttgggctccctctgctggccactgctggactgcacagttttgggaggggtgtgtaaacgttctcctagcccagcccctaacccctgtgtactggcacgggagtccctttgtcccaagctacaaggtaatctcctggaagagagctcctcctactccatcccatatgcttataccgagtgctgactgttaacttgtttattcaaaacacgcaggatatccctgagagttggggaccttgaaagccttgctgactagggcactactaaaatccagtacaaggtctggcccgctcagtaccctgcaacatgaatgagttttcgccctgaacagagtgaacagtggagtataagaaaagatgggaaccgtcagacttgaggttttgtggatttgttttgttttgctcttttgtttgttttgagacaggatatatgtagttttggctggcctggaagtcacagagatccatctgcctctgcctcctgcgtgctagggtgtgcacaccagacctgagctttaaagtaacactttagttaccttaaaatctgtgtggccttgggcaagacacataactattttaaaaggccaggtctctcttgtgttaaatgactttgcttgtaaaataacctgtaaagtttagaaaggatatcttcaggtggtggtggtgttattgtgaaaccatcccataaatggctatgatgatgataatcatgatgttgtgatggtgacagtgatgatgatgatgaccgactttcaaaccggtaccagaaagtcattcaatccactcaacctccagctaaagggagaatgctttctcccaaagtctccctgtagcttgcagttttcacatggctcaacatggcttctagagaaacagtgtgaagaaaccaggcttgggatatatccaggtgacaaggagcaggtcccttagcctcttgctaggcagtcttgggcgaccagggttggagttctgacttccctatagattccctatcagtgtttctctgtggttgctgaatgtggcttccactggcagccccacgaatacgtcctctgagaagaggaagtcaccgctggcccggatctcttttcctgtctgtgcctcagttttcgcaataggaagcagtaagcgagggagcaggggtgaaggggacaagtagggaatggaggtgaagatctagacgtgttctaggccacttccccctaatggtcacttccgcgccctggttttgcaggctgagccgccccttcttcccatcctggccccaccctactctccgcctttttcacagttggagacatggctttgggaagaggtttctcttcctttttcctacctccaggctagctccaccttccccagcaaagaggtgtgttacgtcctctcgttggagactccaattggtagaaagcagtttaacgcaaaaacaaaacacccccatagttaccgtgtgcatgaaacgtatgtgcatgatctcagctaataatcgccgtaactcctcgagtgtttacaatctctgttccgtacgtggcgggagggggggggggaagtgagcttgaaagcattgagctgaacatggatcttccagctaggaagtctggaccgctaacccacttccctttcgctttgcattctgaccgggtattaaaacagatttccagcgatcttccaggactctgaagcccctttgggtccgcttcacgtccaggaaaccgtgggtcaggccatgcctacataaatcagcagggtttgctgccaagactcagtggcccacatcacccaattggattctgagtgcgtaaccacagtcaccccatcatgcatccccagaggccctgcaagcaccccattctccctggaaggctggcaggtgcagggcggggtgccctctgagcgaggaaatgggggtagaggagcccaggtgccgccagttcgcccagcctgaggccagaggcggagccaccatcagggtcgaagtctggcccaggcgacggcctggggcggggcgaggcgggggcggggccgggcagcggggcgcggctgggactggtctcccgagctgcggagggcgggaagagcggagggaggaggggaagaagggtggagggcggggagttggcggctcccgctcggctgggctctgcgcacccacgcttcactgctccgctttctgccccccacctgggcatgcgccccccgcggccctggccccccagagcctacgccgcccccaggagtctccccagagccgcctacgcagaatgggcgtccctagccccacgccgctgagttcgctcctgctgctgctgctaatacttggtaagccaggtggtggtcgccgcgtccctgtcccggccgggtaggtgcctaacaccgtgcagcccaccagcccaccttcctagcatttcagagctggttgcatccctacttctccaacagacgtgcctccactgtctctgggctcggcgtctcgcttccttttgcgcctgtctgcccaatcagttatggggagggtggtggtgtcctcgctctaggttcctagctggggcatatgggcgacctactgaggtatcccctgagacaccatcgggcctccggaggcaggcaccacttctcatcggttacacccagcgtctggggtcgttgctaccaaataccgtgacaaccttctgccccactctcggctcaaggcctggttttgggtgtttgctctgcgtgggcagtgcctggcggtcttcataattgcccagagttggctggaggcccaggggctgattctgaccacgatctctgaaaaaagtctccccaacacccccacctcccaatataacatgtcaccatctgaggcttcttccctcacgtgtctccaccctgggccagttccctctttgcccttccacgctcccagatatttgcctggttgtcagactcagttggtcccaacatccctgcctcaggagaaactaggctccatggaaactgaacctgggatctctaagcacccagtgtctgtcctggtgggtgtttatgatggtgtgttttctgggccaaccttgcgtcatgtctggtgtgtgtgtgtgagtgtgagtgtgtgtgtgttgaggcctgtggaggttgctaacattaccatgtttggggtctgacttggagggctccctgtaggaggtggtctgggaaagatatggcatggagcagttgccaggagactgaagcccttgaaaggaacgtgtgtgtgtgtgtgtgtgtgtgtgtgtgtgtgtgtgtgtgttatgcatatggagaagatactatagtggggcaccccaacctccttctctggtttataccagaactgtgcagtgttgtacagaatggttccttgggcttctggggccaggatgaaaactcctttgggaacaaggcgggaggcagagtgatgtagggagttgaaggagctgtggggcttggttgcctagcgattgcttcttttcctttgggcttaacccgagcagggatgagcccaggggtggttgggaggagtgagtgttattcaggggcgggagaggagctgaatgtcattttagcccactgcagccagcactggcattcacttcacagatgtcgtgaaataccactgtgtatccagtgagggtgggggtggatttgaactcagaactgacttcaaagcagacctttggctgttagaaaggaggcagcccagccattgagaaccttgtagcagcctatgtcctgaggctgtggggacaactttcccatggggatctccaagcatcagcttgtgtggagccaggaaggtgggaggggaccttctcagcagagtttacccatgggcagccaggatggtgtcagcttggctgccttaaccatcctcctgattatgaaatgtgcctggagcgatatgtgcctgagtcacacacatatactcacgggttcaacatcagaactgggagctcttagtgctgagagatagaaactgagacccaggagaggaaagggttggtcccatgttggctttctgactctagcctctgcttcaggcggtggtcatgtgttctctgcgtgacgtagccagaagaaggaaaggagcgagaactgtagagcaggctctcaggctcttgggtggtttcctccagggccagtagcaagctgtggacttacccctggaaatccgggaaattacagttttgtaaaccagggctctccttggaagcatctccgccttcttggttttgtccctcttcaggggtgtgtagaggccctccagagagggcagggacttggccacaatgtcacatttcactttacttttctcatctagaagagagatggttctcacggccaggccttccgtgttggctgggagagagctctagactcacatctgtggttagaacctagtggcagtgctccctagaggtgctctctgggagtttcttcatttctctcatctgaggaatgattgacagcccttcttgcattctagggttctgcggtcttacctagaagtagtggagaggagaaagaagctggacagtccaaggttttggaaccggctgtctgttggaacaggtggtggggtaaaatgggtggagggagggagagagagagaagggggaagggggaaggggcagcaggtgtttggggtctccttattgaaaggaggtctatgcaaatgctgcgcagataggcaaatcatatgtaaatgaaagcttttgtttggggggctgtgcatagtgcatcatctgggttagccagaaggttgacagattctgggggcggggaagggatcttctgccccaggcctgggcagagcctggttcttgccccagaagccacagctgcctgtgtagccttgtgggctgggagaagcagtgagctcatggcacagctgtagtggggagggtattgtgtagtgaggactgactaggtccgtgccctgtccagcatggtgccccatccagtgcagtaccccagccagcctgggccactggctccattgtctagcccaggtgacagagctaagccaagcagcctttctgtaagatgttgtcagctcccctccagcaaaaggctcagaatcccttagctagaagttctttctgagcccggagagacgccacacatggcagggtaggagcgataaagatccagccacgagctggagagttgggaatcaggcatgcttcttttatttgttatttccaattgcatgtgtatgagggtccacatgtatgcatgggtgcaggtgcgtatatgtgagtgtctgtgtaaaggtcagaggtcaacctcaggggtcatggctcaggaaccgtccactgcatttattcatgtgcgtgtgcgtgtgcgtgtgtgtgtgtgtgtgtgtgtgtgtgtgtgtgtgtgtgagagagagagagagagagagagaggagacaactttcaggattcagttccttccttcccttgaggggctcaaacccaggttgtcaggcttatgtggctactcaccagccaccgtgccaagctttttccatagttgccgggaattgaactcaggtcctgatgcttgcatggaaagcattttacttaccgggctgtctataccccagactccggatggactcctctgttcatgtaggtgctctgcctctagttagctagagtattcctctgttcaggtggatctgaacctacgtgatgtgctgggatgctggtgtctcgtgtcccatcttgtgttcccatctgtgtcttcgcccagctatgttctaaccatccctaggtttccctttccttcacaggcagcagtcaagaatggtgctgatgatactggccatcaagtggggactcgttctctctaaaaagattccagttctttctgcttttaccccacaggaaccaggtgctacgcccggcaggtgcatgtccccaggggacctctttaccgggtggctggcaccgctgtctctatctcctgcaacgtgagtgactatgagggccctgcccagcaagacttcgagtggttcatgtacagaccagaggccccagctacgtccctgggcattgtcagcaccaaggatagccagttctcctatgctgtctttgggcctcgtgtggcatctggtgacctgcaggtgcagcgcctgaagggagattcggtggtgctcaagattgctcgcctgcaggcccaggactctggcttttatgagtgctacaccccctccacggatacgcagtacctgggcaactacagtgccaaggtggagctgagaggtactgggctctgagctaggtggtgagagagcctcacaagcactggggttataggtataagccagcacgctcagatctatttttgcttcgtcttcctccttctctgtcatcttcttccttctcctcttctccccccacccccatcttctcagtactggaaattgaacctacagcatggaacataccaagggagcactctactaagctatattccctgtgttgttttttgagggctcactcttgtagcccaggctagcttacaactagcctaggttggcctgaaactggtgacaaaactcccacaattcactgtgtagctcaggcagtattgtgtcagctccagtgccatcaagccagtctttccagcagttttttttttttttttttggggggggggatgggctgaatcagaaactttccaagttgaccagaccagcactgaacttgttctgtagcccagacggcccttgaacttgactcttctgccttagcttcctgggtagttgcgattataggccggcaccatcaggtccagcctctttatctttagagaaggaagacaggattactttttttgagtatttaaaatggatcagtcttagacatcagagtaggggtcagtaggcttgctctgtgacgttcagcaagtagttattgaatatcttgatgtgcccagaccaagcttggcatctctgcggtatagaagaaaagctacagagcacagttcttacattctagaagcctagagagtgtgtagtgaaacaggatacgcacaggaaacaggagggatgctgctccaagccctctctcactaaagcctttctctccagttcttccagatgagctgcaggtatctgctgcccctccagggccccgagggcgccaggctgccacctccccctcacgcctcacagtgcacgaggggcaggagcttgcgctgggctgcctggctcagaccaaaacaaagaaacacacacacctgtcggtgtcctttgggagagccattccggaggcgccagtggggcgagccactctacaggaagtagtgggactgcgctccgacatggcggtggaggctggagcgccctacgctgagaggctagcttctggggagcttcggctgagcaaggaagggactgatcggtaccgaatggtggttgggggtgcccaggctggagactcgggcacctaccactgtacggccgctgagtggattcaggatcctgacggctcctgggtccaggtcgcagagaagagggcagtcctggctcatgttgatgtgcagactctatgtgagtgcagcatagcccactggggggggggggtgtctctcagttgggcatcgggagtgccgcacaagcatggagatacaaaggctatggggggaagggtgaaattcgggtcctggggtgagggagatataagaggcctctaaatttctgcaaagaagaattacaggtggggggcccaggcatctcagtgactcctcccatctcctgctgtgtttcagccagccagctggcggtgaccgtgggacctggtgaacgtcggattggcccaggcgaacccttagaactgctgtgcaatgtgtccggtgcactgcccccaccaggccgtcatgctgcgtactctgtgggctgggagatggcccctgcaggggctcctggacccggccgcctggtggcccagctggacacggaaggtataggcagcctgggccctggctatgaggaccggcacattgccatggagaaagtagcatccagaacctaccgactgcggctggaggctgccaggcccgctgatgcaggcacctaccgctgcctcgccaaagcctatgttcgagggtctgggacccggcttcgtgaagcggccagtgctcgttcccggcctctccctgtgcatgtgagagaagaaggtaagaggatgttgagcccttgacggggttcagaacttatagaatttatttcctaacctcttagcccctgggccttcacctggtaacccccgtgttctttgctctgcaggcgtggtgctagaggccgtggcgtggctagcagggggcactgtgtaccggggagagacggcctccctgctatgcaacatctctgtgcggggcggccccccagggctgcgactagcagccagctggtgggtggagaggccagaggagggcgagctgagctctggccctgctcagcttgtgggtggagtgggtcaggacggtgtggcagagctgggagtccggcctggagggggtcctgtcagtgtggagctggtgggacccagaagtcatcggctaagactgcatggcttggggcctgaggatgaaggcatataccactgtgccccaagtgcctgggtgcagcatgcggactacagctggtaccaggcaggcagtgcgcgctccgggcctgttacagtctacccctacacgcatggtgagtgacagccaccatctacccacctgttcctgctctgtttgcccctttccatcttcctgtcttcccttgcaatcctttttccacatccctttgcatgaagggtcccaagccggcctgagtgctgagaccgaggggaggggggtggtggtaggggtgcaggggggtgggggggatgggggatggttgtgtttgtgtgtgaagtgtaggtaggcaggactggcgcttagctctcccttggggagggctgagtctagaaaatctgcaggggagagtgtcagagaccgtggtactctctgagcagagcctgtcttcttttctgccagctgtggataccctatttgtgcccctgttggtgggtacaggagtcgccctagttaccggcgccagcgtcctggctaccatcacctgctgctttatgaagaggatgcggaagcggtgatctgtagcaccccaggtgagggaaaggaactgccttcctcaggcttcctgtgctgagctgtacctgggcaccatcagggggagaagcagccagcttcacagtcctgcaggatcgtatagcagggtaagggtcaaagggagcctcttcctcagccgactccacatgctctttccagttcttgcaggtgttgactgtcttccagccagtgccacccctcctctggttgcctggataccctctccctctgtccagcccacctttaatttatttgaccagccatcacctagagtgggagacatggctcccctgtccccaccttccctcaagtttcctggctgccgttcttagtcccacactcatgttgtaggaaggccagttcctgtcctcaaactagtttttctaaaatgtgaataaactggttttgtaaaatcgaggcctgttgtgtcttctcttgcggtgaagctataaaaggcagcatcgggggtgggtggggggagtggggtggtggtagggtggttgctggacaacctgggcctctcttcccaccataaacaccatctgtccctttgtgggccttgttacccaccaactgcatgaggggatgccggggtcccatctgttgtccaaaatgtctgtgctgagccaagtcctaatggggcttctatttgggaagggggacctaggaagaggaggggtgagttccagctgagctctgcccctttcacagagctccaagggacgagtcttttctgagctctccagactggggcacaccctcctctggtccatttctcctggttgaactagtcttggaccagactcctcccacaggccctggggcctcagtctttttcctcctgcccttaattattctctgacagcagccgaataggagcttcagaacacggctgcctacttaaggacagcagcagttgggagagcctgtgtcctctgtgtacacaagagccgcctcatctgcttacatctgatgccaggacttgcctgctggctagccgcaactccccgcctaaagggttctccggtcctaagagcctcagctgtcctaatactttgagcggcatccagtctaccttttttcattcagtagttgaaagtttattgagcattattgagtttgccaacatatcatttttttttaacagataaggaagctgaggcccagagaagtaataggtcttgctgagagtcatagaggtaattagtgacaatcagcattggtgctagaacacaggtctcctggctgtgccctggacagcggtgccctgagtgacctccaggaacagcttcaatgtctccattccattgcttcgtgtgcggataccaagcaccccacccctcttgtctagactcctcgattttctctgaattcaaaccctgctcagtccctgtgctcaggtccaatatgtgttcgtgggatcccagcaggttcatgtgcgtggacctcatctttgagagtgacccagctggtcccgaaacctgtggccattgctagatggaaggggagaggcaacaggcagcttgagtcctctctgcgtggacccactctgagctgggcactgggagggaggcctcgatgccccattggatgctggcttcttagcctgggacagagcagcagacttttattcgagggcagggatgggtatagccagggccagagtctgagccagtcctatcaggttacgtgctcacttgggctacacttagctccaggggggccagcctcaggtccattgccatgctgttgctgtcccctcaaccatcccaagatgactggggcaagacaaggatgcagtggaggtggaatgtgtctccagggtgccctgtcctgggaggacaggtggcagacagcagacacctgtaggtacaggctccattttctcccctagtcagtcttgccttgtgagtctcttaagagagttggtcttttgtggtaaggccaattcagctacagaccccccactgcctccttgggggtccctaaatggccttctcctatctctgttgccctctcgggtgccactggccagttaccaatgacgtttcttggacccagagttaagcccttcgagtctggacctgggtcccctctccccaacatttcccttcttgtttctctgttccttgaggaacctggggtgcttttcagttcctccagcttctcttccgcttagatgcttcacccaagtgcagtccccagacagacagtgtcaccgcgatctgggaacctgttaggtctgggaactagttagacgtgcagattttttttttttttttttggtttccgtcccggacctactgagtcagaatgcagggagtggggctggtaatctgtgttttaacaagcccatccaggtgagtaaagctttgtaactgctggctcccaccattccccactgccttactcaatccttagcttcctgtccctaatgccctctcacttgtggctataaccgcttgtgtgggctcctagggtcgagtcttttctgagctctccagactgaagccatacttccttcagtggctgggagttatttctgacctccaccttcgctgtgctctcgtgttaagaaccaggtctttgaatatcacacctgacacttactcaccgttctgaatgagccctgccactgtgccccaaggataaactacttccccctgggatccaggtacccttgtaaaaccctttattaagtctctccatggcctttcctctgcttcttgcttctgtggcaggacctgcaaggtttcattcctctctcacaaaatagttgtccttggctgtccccaggtcctgcttcagggcccctccctgctcagcatctacccccattgcttgtttgcctttctgacctctcgccatgggacagtgatgctggggagggcacccacacctgtgcccacctctacccagtgctctcttctctagttaggcaggcgtgtcacacatagggaggccagttgaggggaggtgagtgggggtggtagtccacctgacagcctgctccctaagccacgctccctggtttgaggctacctatatctggaagaaaaggatgcccatggatttctcacaaaggtgtgctgcaggtgacgatcatcgactgccaagccacttaccacctgagcgattatccattggctgtctctatctgctccaccttcccgatcaacccccatgagcccatccttctgtccatccatccacccatgaaccgatgtgaaggtcaaacacagacagactgacatgttctctcaccccgccctgcaaccctctctcttcaaaccaggacctcagccttccctactcgatcctggactcagcgggcctctcccaactttagctgttcctcgggacactgcctgcctcctcttcttccacctccactcgcagcttctgtgtacctgagtccggccccctggtctgccacagggggtgggaggaaaccagtcacaccttggactcactctctgggggtggcaggcagccattgtgctccttgtcagctccatctcccgcacctgccccctccccagccccttcttcctccaccttctcatccagcctgctggggatggaccagtagagatgggcatcaaggcgggccgcggcttctgccagttcccgagcactgcacgagggtgtgggcacctcaaaggtttcgtggaagctggcgtagtccacctcatagaaaccatcctccagggtgagcacggatgtgaaccggtggccccacaacacttcatccaccaggtacgagcttcgagcttggcacgtcattcctggggggtggggggaggagaagcggcatcagtcaaaggggcccctgccagaggattccttctcctgtctgtcatcccacaaccctcttctctctctgagagtcccacctctctttttagttagccctcttctctatctgccagcctatgttttcccctactctccattgagaagcttaaccttaagcctaaccttcctgtttcccacagagccgcctctacccacccccaagcattcccagacaatgggctgaactgattacaccccaggattgaaagctcaccatctcattaaaagtccagtcctttgtgcaacgtgccaatcgtctttacaaatgtgttttacatttatgtgtctatatgcgtgcatatgtatgtatgtggaggtcagaggacaacttggggagacagttgactccccaatgtgagacctggtaattcaactcaggtcagtagtcaggcgtggtggcaagctgagacatctctttggctctgggttttctcttacataaactaaactctgtctcctaggacccgtggtccctggttccattcccttaccacctgacacccccttgagtgtaaatatggggttcccttacatcttctcttcctcagattgaacactcatggccatttcttacttcatctgactcccccaaagcttacaatcttcattgcaaatcagaatggccaccaggcccaggtaagggctcatctgaagtgctttttcaactgtggccttatctgtgcataaaagaaggcttactatctcttgcttctcgcccagatgctttggtgaagcgggcccgtgattacattacataaacgcctttggaagctgcatcacgttgctgcagcaaagccagtggccaactaaaacccccagttctttctccaccggagcctttccatgctgtgcttacataagtgatttttttaaagcctaaatgtagaattttatatttattccccttaaatgtcatcatgttgggttttggctcattattcttgcttttcaaaagcagtttgaatcccaaaatactaccatccttcccagccttatctctagaaaagtcaagcaagctcccatccccatgtcctttacactgccccttcccagttcttgccctgagcctgtgtcctgtcttctctgttgggtttgtgcaccctcccctcggggcagatcattttgttcctacctcagaatcttcccaaaccggaatccatctcaaaaacagaggagtaagcattcactaatcagagaccggctctgacatcggaagtctggccctgagacatcttggggtcattggtattctttggcaaagctggaataagatgtatcagggatcgtagggaaagagaggccaccggggcctctgcagggagaaggcctgagaagcagaggtagggcttgggggagtagggttaggtgcaaagtggaggcagtggcagagggggaagagaaggcagatgaaaaagtccctgatagaaacctgtccgagattgtgtcagagagagggacagcgcagagacagagggagcagtgtggaatgggcatgggctagaaccagcctagttggagtgaaggaggagaggggagtgggaagacctgaggtggccatggagaagatgatgtttttgtctaggcccaggagccaggtttcaaggctagcagcagggagctagcctgtccgtagcagctccgcagctcctcctagtggcctcttggttcacctgcgtcttccttatgctccctgacggctaggacctcttcaaggacctgtttttgctccagtactagtctttttcctacctacctcccttttacttaggtcagttaaattccagagctatggacctctgggcttcaagaaccctgcacttaaccttcatcccaacactgtaccaggaaacactgaagatagatgtcctatgttcaacccaggctgtgctatttattggcttgtgacagcgggctatttatgggacctttctttggggctactcattctctgaaaaccgagcacagtcaaaagtaacctccaggggagctttgctgggcttaaatgaattcagagatgtaaaatgtagttcaaagtgacatagctgtcaggtcagggcctcaagctagtgccatttcatagacctcttccaagcttttcttgactctgcaaagtcaccctgtccatccctgtcatctcccgtcctctccccggcccccgctacccctcaggcctgtcaccctacactccattctctgtccatctttctgcgcctcccctggctgcttttcttgcccttgtcctgcatccctgctcccatcctccagcctgcccgcacccgtggcctccaccatgccctcgagaatgactacgatctcgaagtcgtccctctcgagggcgcggcgcgatgcctcccagaaggggctggcggcatcgatttcgtggctgatgacgagaggtgagacgagaaagaggcggtcgtcccccgtgtcaaagcccacgctgaggtcggtctggtgcaaagggatgaactcgccctcgagcgtctgacgggagcggatgagcttggctcggatggaggcctcgacgatgtgtgaggatcgcaggtcgcccacgcgaaacatgagacagaggcgcccgtcgcgcagagacaccacggcgtgcgaggagaagacgagagtggcggcgcgcttgttgggctgcgagatcttgacgaacatgcagcccaccatgaaagcgttcaccatggagcccaggatagcctgcagcagcagcagcacgatgccctcgggacactggtcggtgatgacgcggtgcccatagccgatggtggtctccgtctcgatggagaagaggaaggcggccacgaagccgttgaggttgttgacgcacggggtccacgcggtgtcctccaggtgctccaggtcgccgcggccgtaggcgatgagccaccagatggcgccgaagaagagccaagtgagcgcgtaggcgagcacgaagaagagcaggctgaggcgccactgcaggtccaccagcgtggtgaacaggtcggtcaggtagcggtaggtctcgcggacgttgccctgctgcacgttacagcgaccgtccttctccacgtagcgctggcgaccgcggcggcgtggcggctcctccgacccgggagagaaagcggcgttctcctgcgccatggcggccgcagcggggatcctgcggggtcttaataaaggtgtgccgagttgatggatctgccccgaactcagggccaatgctgtgagacaatctcccttcctgtctctttagccttagtttttccccactggtggattgggaacgataatccctaacatcccataaatctcagaaagttggggcacaagtgctggggagatggctcaaatgattcactggttgctcttccagcggatctgatttcgattcccagcacccacaagtcggctcacaaccggctgtaactcgcactctgctggcctccgagggtaatgcacagacgtacatgagggcaaactattacataaaataaaacaatggttaagaaaaagttgtatggctggagaggtgactcagcggggttaagagcgctgcctgcacttccagagaggttctgagttcaattcccaggaaccacatggtggcttacaacaatctgtaatgggatcttatgccctcttctgatgtgtctgaaggcagcggcagtgtaatcatatacattaagtaaataaatctttttaaaaaagaataaagaattatgagagagagagagagagagagagagagagagagagagttgtacagattacacaggataaagagcacagactgggtgtcgaagttcagtaagaaaagaggcattagccatctcgatgtcacagatctcagcgtcactacctcaagctggtgtatgtagcaactcacaggcaccccggatcagacatttagggtactgaagaggtagacttcttggcagttccttctccatgcaaagccctccctgcgatgaggacttccacagccctttccctggcaattatcccttcccccagcactcttcagcatcctgccagaagccccacctgaagactgttccctcggtgttctccctggcctcactctttctcctgctacatttcccctccaccccagacttcccaaggagaaagcaatgcagactgtgcacaaaaacctccagtgtgcaaaggttggatgtcctcagcattgggaacttcccactggcaattctaactgcttcaccgtggtcactgatgctctgataccagcccatttcccgccagggctctttcccacaggagacacgctgaaaagggtgggcaataggagattgggggccacgcgtgagctcaactgcccacggcaaggatgaaggaggcgccaggccatccagagttacgctagtctagtatctctcagattcgtattcttctaagagataagaaatcagaccaatcgaaacaccaaacacccacatcgaccccccctaccaatttcctgatttgcatttactaccctaccagcaaccccacccactcctgccatatgtcccaaagcccacattccacacaaagcccagattccaagcaaaacccacctggttttgcttcaaattcttcccccctgagaagcactctgggttataatcttcccggagagatggatggccagagtcggttcctaggctttcagggtcccctaggagatatggaccgtatgaacagaagtctgtagaataaggattaagactcatcaaccttcctttctctttcctgggatttgccatctcctcccattcagggtgaggggtggggcaggaaggctggggaagtggggagagcaggtggccctgtgggggcagaaatgtgacataaggatctcagatggtttggatgtttgaccagatcctagggagaaactgcatgaatatatacccacaaacccgacattccatttttaaactttggagccaagtgttctgtagccagcagacctttggagggtgtgtgtatgttaaagaaaggcacaaggaaaaaaccccaaaaagatggtttgtaaccccacacacttattttccatggaagtcaggagacatgacctgggaacacttcggcaatggcagattaagatcttcccctcccccaacagcaagcaggcttgtttttccctctctgcagcccaggatgtcctctgcacctcatctgtaagttttcagtgcctcgagaccccaggtctctttcatcctagtattaacttcaggtgggcttctagacagtcttcgtagggtctaaggtgatctgacctccatctacggccaggaatggggaaggattcccagtgtctgatcatccccagaacacgactgcccagggagcctactgatgacatcctagccattgccatctcgagaaaagctctcttcttcatgggacaggaaaggtgtgcggtgtccaccacctgaagagcaacgtcttcatttcttcctcttccctccaaataactccagttcttccgaccacagttcttgggcatgctgtgacccctttcagtaagatccgagcaccacattatcttggagtactccacctccctctagagagcgctggccagtacagggggcttatcttttggaaaggggtctgtcggggagaagtccctctgggagcagctccacccaaacccctcttggctcagaaataggggcccaaaccccaagtcccacaactcaactcacagagcctggagagaagagtagccagcagcagagacccttgggggttggcgtccatgtccctgacaccatctcccccagtaccctaggttccctctgagattgggagccgccgacactgctgtttctcctgaatgtaacggcagctcagactaggacttggtatctgtgtcatccccacttcccaggttcccctgctcctctctcgtttctatggcaaccagtctggctacagctccacagcgtccccctccctttcccagtcctgggtaccactctggctaatccacacgccacagctatttttagccaaagtccttcctcctggacacggagagtcatctcctcacctctttatagggacgaaagcaagtgtgtgtgtgggggaactggtgtgctcctcattctgggaaaatagaggcattggaaataaaatatttgatttcagaggccatctgggagtttgcagttcacaatccccagcagggaccactgggcaaaggtgctgccctccagacagcggacagaaggaccaggcccagcgtgacaaggctgcaattttttaagagacctctgatgcagaaggcagcaggcagagagaaaaaggtctgcagaggtaggggctagagaagcagggccagaggctccgccatcgtcatcaccatcactgatatacctgtgacccgaagaggtcccttcacttctctgagccatagtgattctgtctgtctcagagtgtgggcgtgggcaaacagccctcttctgctggcttcacctgggatgcagatcaaattaggtgatgtaaataaaagggttttgagatgtactttgctcatagcaaaaagttgagaaaaccctcaaat

SEQ ID NO: 812 - DNA, 2200 bp, Mus musculus
tcttccaggactctgaagcccctttgggtccgcttcacgtccaggaaaccgtgggtcaggccatgcctacataaatcagcagggtttgctgccaagactcagtggcccacatcacccaattggattctgaagcctacgccgcccccaggagtctccccagagccgcctacgcagaatgggcgtccctagccccacgccgctgagttcgctcctgctgctgctgctaatacttggaaccaggtgctacgcccggcaggtgcatgtccccaggggacctctttaccgggtggctggcaccgctgtctctatctcctgcaacgtgagtgactatgagggccctgcccagcaagacttcgagtggttcatgtacagaccagaggccccagctacgtccctgggcattgtcagcaccaaggatagccagttctcctatgctgtctttgggcctcgtgtggcatctggtgacctgcaggtgcagcgcctgaagggagattcggtggtgctcaagattgctcgcctgcaggcccaggactctggcttttatgagtgctacaccccctccacggatacgcagtacctgggcaactacagtgccaaggtggagctgagagtgcacgaggggcaggagcttgcgctgggctgcctggctcagaccaaaacaaagaaacacacacacctgtcggtgtcctttgggagagccattccggaggcgccagtggggcgagccactctacaggaagtagtgggactgcgctccgacatggcggtggaggctggagcgccctacgctgagaggctagcttctggggagcttcggctgagcaaggaagggactgatcggtaccgaatggtggttgggggtgcccaggctggagactcgggcacctaccactgtacggccgctgagtggattcaggatcctgacggctcctgggtccaggtcgcagagaagagggcagtcctggctcatgttgatgtgcagactctatccagccagctggcggtgaccgtgggacctggtgaacgtcggattggcccaggcgaacccttagaactgctgtgcaatgtgtccggtgcactgcccccaccaggccgtcatgctgcgtactctgtgggctgggagatggcccctgcaggggctcctggacccggccgcctggtggcccagctggacacggaaggtataggcagcctgggccctggctatgaggaccggcacattgccatggagaaagtagcatccagaacctaccgactgcggctggaggctgccaggcccgctgatgcaggcacctaccgctgcctcgccaaagcctatgttcgagggtctgggacccggcttcgtgaagcggccagtgctcgttcccggcctctccctgtgcatgtgagagaagaaggcgtggtgctagaggccgtggcgtggctagcagggggcactgtgtaccggggagagacggcctccctgctatgcaacatctctgtgcggggcggccccccagggctgcgactagcagccagctggtgggtggagaggccagaggagggcgagctgagctctggccctgctcagcttgtgggtggagtgggtcaggacggtgtggcagagctgggagtccggcctggagggggtcctgtcagtgtggagctggtgggacccagaagtcatcggctaagactgcatggcttggggcctgaggatgaaggcatataccactgtgccccaagtgcctgggtgcagcatgcggactacagctggtaccaggcaggcagtgcgcgctccgggcctgttacagtctacccctacacgcatgctgtggataccctatttgtgcccctgttggtgggtacaggagtcgccctagttaccggcgccagcgtcctggctaccatcacctgctgctttatgaagaggatgcggaagcggtgatctgtagcaccccagttcttgcaggtgttgactgtcttccagccagtgccacccctcctctggttgcctggataccctctccctctgtccagcccacctttaatttatttgaccagccatcacctagagtgggagacatggctcccctgtccccaccttccctcaagtttcctggctgccgttcttagtcccacactcatgttgtaggaaggccagttcctgtcctcaaactagtttttctaaaatgtgaataaactggttttgtaaaatcga

SEQ ID NO: 813 - protein, 592 aa, Mus musculus
SLRRPQESPQSRLRRMGVPSPTPLSSLLLLLLILGTRCYARQVHVPRGPLYRVAGTAVSISCNVSDYEGPAQQDFEWFMYRPEAPATSLGIVSTKDSQFSYAVFGPRVASGDLQVQRLKGDSVVLKIARLQAQDSGFYECYTPSTDTQYLGNYSAKVELRVHEGQELALGCLAQTKTKKHTHLSVSFGRAIPEAPVGRATLQEVVGLRSDMAVEAGAPYAERLASGELRLSKEGTDRYRMVVGGAQAGDSGTYHCTAAEWIQDPDGSWVQVAEKRAVLAHVDVQTLSSQLAVTVGPGERRIGPGEPLELLCNVSGALPPPGRHAAYSVGWEMAPAGAPGPGRLVAQLDTEGIGSLGPGYEDRHIAMEKVASRYLRLEAARPADAGYCLAKAYVRGSGTRLREAASARSRPLPVHVREEGVVLEAVAWLAGGTVYRGETASLLCNISVRGGPPGLRLAASWWVERPEEGELSSGPAQLVGGVGQDGVAELGVRPGGGPVSVELVGPRSHRLRLHGLGPEDEGIYHCAPSAWVQHADYSWYQAGSARSGPVTVYPYTHAVDTLFVPLLVGTGVVTGASVLATITCCFMKRMRKR

SEQ ID NO: 814 - DNA, 49589 bp, Homo sapiens
  misc_feature (1)...(49589): n = A,T,C or G
cactgggagcatacaagagcctgctaatcccatcctaagttgacagagagggtgggcagtagttgggaagggtaggacaactaggtcttcaagataggagtgccagattatgcttcaaatcagaatggaagggtacacatgcagatgggacaaagagctgtgccagggagggagaggaggggcatgggacactggcctctctgagcaaaagggataagggtgagtgccccaaggcaggggtgggcctttccttgcagatggacagcttcttctctgagtcagtgggaaggaggccaccgtggcctgggcctttccagggcagcagccactgcagctccttgaactctggcatgggggaggctagaatggaggggaggatgggaggccagtaccttgatgcctgcgcttcggcacttgcccacagcatctggcacagcagcccggggagggtcaatcatagacatgagccccacaaagcaaagcttctccgtgggaaagttcagctcatccgtgtcgaatttgaagccccgaggaaactttccagatggcagattcagttgacagaatcctaaaggggggcagaagggatcagtgagatccgcagagtggcttcctggacgcccccacagtcccccaccccagggatgccgcagaggcttgggaatccccttctgagcctcctgtttctggcctctcacccagcacacgctccccaagtccccccagctccatgtaggcattttgaaaggcatcttgcatctccttgtcgagcgggatctccttgccctgcaccaggatggtggagcaccggtccagaatgcgctctggggcccccttcatcaccagcacgtggctctgggggctgtcttctcgctcgtggatagacagctggagagacaacaggtagttacagagagggccatacttgtcttggtagcgcggcatagagcagcagctggtaaggaaaccaccttagaaaagtagccccaacccatcaaagattgtcaacaaagagaatctccttgtgcaggggggtgtttagacctcacagttccaacacttgtaacctgagagccacctccgtaggacagtctttcattcaacaaatatttattgaggtcaggttaagacaggcactgtgctaggggctgaacggctccctcctcagcatccccaccaccacctggcctcagggggctttacctctatggataataaggaatgctgagattgcattcttggcatttaacaggtgcctaaaggctaaggggcaccataaaggaattacagaattatggtttcactgactggggtagaagagttggaaggctaggccagaggatgcggagctatgggaagaagagttgagagagtgacagattgtagtaagggatggagtaaggtttgggagctggggctagttgcaatcagacatgcagtcatatgagctgtcctgggggacttagcagggggagggaacatgaccctcagacacccccactcctgctagtgatgattccccttggctttgtccaccctcacccatttatatccctctctcttcctctgtcctggcaacccaagcagacctggtacttgttggtagagttgaaaggaatctctgccaccttggggtttctgtctctcattttcctcactgagccacaggagagctcaatgcacttgagcagagctgactcagaggcatcaccagctgtgtcccgctgccagaagagacaagaattcagtgtcagcatgggagggaagggagtggaggatcaggtgaaggcggcactgaaacccccaaggcagccacatcatgtgagaaggaaagctggggccagcaagaggctttggagacacccccaaaacatacctggtgtgtgtcctgaccccctaccttagacacggagatgttctcctgtcctgccttgaagacggcgcggttgcagagaccagcaattcgagacagggccgtccacgtaggggatcgtttgtcaaaagtggcccctgggaggaaatgagggggaaccaggagcgtggctccctttagagcctttatctcaaccactcaccccaccacgccactgccctcagcctcctctaatcctatccaccccctctggagcacccaatcaccagactgatcttcggtggtgtcagcctcatggatttggttgtcgaaccacatgtgggcgacggtcatgcggttctgggtgagggtgcccgtcttgtccgagcagatggtggacgtggagcccagcgtctccaccgcctccaggttcttcaccaggcagttcttccgtgccatgcgcttggctgtcagggtcaggcacacctggtagagaaagaggagaataaaaaaggttaaggctgaagccggagatggccataaccttaccctagaccgtggctccattcctcctcccctgattctactccactaacttgaatgggtgggacttagctgtaaataatgaatgttcaattttagatgtgttgagatcatgagtatctgttaagatgaaatgcccattagggggtttaagacgtttgactagagctccagagagggccagagcagagctgagcatagggatgtctgagtcatcaacacagaagggacactgcaaactgggaggagattggctcttgctcagggtgtaggaagaacagacagctgaggcctgagaatcagtgtagggggagcaggaagggacagaggagaggcgaaccaggatagtgacacatcacagcaatcgacaaaagagagaatggtaggagggtggacagcagtatctgtttcagcagcagagttagggaggagagctgagaaaaggtccctggatttgctagttagtgactggtgacctttgagacagcctctacaggagacttggacggaatgagacccagactgctggcagatcgtgagaaaaggcagccgtgacaagctccaaaagagaaactgagtgcctaagaatagccccacctgagatttctcaactcataccctaagccatgtattaagtgatctctgagtatcgcatccaataagtgactctagggggaaaaagtagtgagaagctacaagcaactgtgcctctatcactctgaggaaagagtagtgagaccctcccctggtggcacctcagcctgacccactcacagtgacagtggccagaagcccctcaggcacgttggccactatgatgccgatgaggaagatgactgcctccagccagctgtagcccaggatgagggagagcacgaagaaggagacccccaggaatacagcgacccctgtgatcagctggatgaagtgttcaatctccattgctatgggtgtccgcccaacctccaggcctgaggcgagagtagctatgcggcccatcaccgtccggtctcctgtggcaatcacaatgcccctggcagtgcctgcaacatggtggggcatcaggttgggtgccttgtggctcccagggactgcagtcccatcctatttcctgagcaaggaaaatcatcacaggataggtgagccaaagccgcagatctggaggccacattcagtaggttgtccccacttggccttcctttccctggatagatcgccaatccttgaatcaatacaacagcaaattattttctcttgtactcgagcctggggagaagcttgcaaataatctcaaagttcaaatagacaagattcaataaataaaaattgcctgtggcattttggtaaaatcattcccatacttgataccatccaaaagtatattatgaacacaaagtaaagcactcattatggattttccatccagtcttaagattttctttctcaacattaggcatgaatctctatagaggaagccaggcaattgctaacccttgtgtgacattacaggggtcttctgggaaggaagggtggtgtattgaaaaaagcatgcacattggagccagccaaatttgggtttgaatccttatttgaattcctatctcggtgctgttttaatatttagatgagattgtgctttaatatacttaggccagtgcctggaacatagcgggtgctcaacaaatatctcatttatttcctttcctcttttcaaagccaattgcagagtaagcaataggaatgtattactaggcatttctgaataaatcaattgtgggaaatgtaaatttcaaaatctcagtacattaaaaatttaggaaatttggccaggctcggtggctcatgcctgtaatcccagcactttgggaggctgaggcaggaggatcacttgagcccaggagtttgaggccagcctgggtaacatagtgagaccccatctctaatatacatatatatatattagctgggtgtggtatcacacgcctgtagtcccaaatactctggaggctgaggtgggagatcgcttgagcctgggaggtcaaggctgcagtgagctgtgattgcaccactgcactccagtctgggtgacaaagcaagatcttgtctcaaaagcaaaacaaaaaacaaacttaggaaatgtaatgtgtggtgatttttatttgtacagttggccctccatattcacagattccatgtccatagattcaaccaacctcagatcgaaaatatttggagctaaataaaaataacaatacaacaataaaaataatacaaatttaaaaacaaaacagtataaaaattacattgcactcggtattataagtaatctagagttgattcaaagtatatgggaggatgtgcgcagattatatgcaaatattatgcgatttcatatcagggcctttgaggatccttagattttggtaacgaagggggtcctggaaccaatccctcatggattccaagcagtggaattccaacttgtcgaagaagggaaaaaaaccacagagaaacataatacactgaggagaaatgagtaatggacaggggaagtgtggattgggatatgaggcctcctttgccctattttcagaggccactggtctagtgaggcctctttctgtctcttccctcctactccttctctgatgcagccctgactctgctcactggctttaccacagagggcacaggtttcagttgtgcttggacccctgccattaagtaatggcagctctgggagttcttattgacctttgtttatctctagaacccagaacagggatggggcaaactgggtagtctgtgcatggtgaaacatgtcttttgatgtaacaaaggttagaagcagcctgaagtaggccccaagtgttcacctggccagaatgccttcttggccctcccagaccctggggccctggccaaagcaaaggttatcgaagggggcagcgaggcccagaaccacaaggaatagaagcatcaatcaaatccaaagactcctaagaatccaggttggttctgagcgtatgtgcatctgtgtgtgcgcatgcgtaaggggttcttaacccaatacctgaaagctttgaaatccactcaagtcttggggtggacagaacagagatctccctggggaagggagatacatttcccatggagtcaggctgccctcagtcaataccctgctctgtggagggtgtttccataatattcagggccccctgacccctcaattgccccaccaatggcagagcttttgccaggtaagtactaccagagcccttcatcctgactatggattcaggattcagactctttcctacagggggcagcctggcttctcaccttcaacacagttggtggagaagaaacagatattgcgggtctccagggggttctcatgggtgaactcgggggagcgggtctggggctccgactctcctgttaaggatgagttatccacctgaggaggaaggagtgcatagtcatcagactggcagagccacttgtatgcacacagctgtctcctgaaccacctccaaccacactcaatcttcatgacacgaggaacaaagtcacacttgccctcatcacatatttatggcattactcatctattgcccctgccctggtttggaattctgactcctcctgacttcttatgtgacctcgggttacttgcttaaccaagagagcctccatgtactcaactgtaaaatggtgaatgtaaacagaatctctgccttgcacaaccacagggggagacactaacactgtagttatgaaaatgcacctcctggggtcattcaggatgcaacgtgtgtggccacatgcagcagccctgcatgattacaccactctttcagaattacatcagatagcacatcgaacatatataaagcagctgacacataattggtattcaatacacgattgctaaaaagtggacaacaaagaaatacctggggcatagagcattcataacacacagatgcaaggaggcactgcacaagcaccccacactgagagaaggtttagcaggggcgtaggcatggtgttgacatttggacctgggtctctccacctttaaacctcactgggcccctctcagctctgcacacagccttctccttagactcaactgcttgctctggtatgacctcctcaccttacagccatgagaagagatgatccggaggtcagcagggacgcggtctccacccttcacctccaccaggtctcccaccaccacttcctctgcgttgatctgcatcttctctccctcccggatcacaagggcttgctgtggggagccacaggcagctcatgaaatgcttgtctctgcccctgccttcttctcctgctggtctcccacaccgtcaagcagaaggagaagccccataaacaattaggtgctggcatggaaagctggaggatcttttctgtccatctctatcttagtgcctgggagctgacagaagatgagctggactcttgccaaaaccttacagcctagcccagagcccagccctgccatcttacctgaggtaccatgttcttgaaggaatccatgatcttggagctcttggcctcctggtagtaggagaagcagccagtgacaatgaccacagctgccagcaccacacccagatatagctggtaaggagaaagagtttcagggacctgaccttccccccaaccctaaaggggcagctgccacttgggatgagcaggcagtgccatccaagatgacagcccagacctttgtctgtgactgagagtgatgatggtaggggaaagcccttctcactaacctcccccttgatctgccaacctcaagcctgttaagactagaaatgggagggaaagtcttaggaagttcccagggttaggactttgctaggggatgaagacccaggcacacagacaggctcacttaagcggggaggaacagggagagattgtttcattaattaatgagtatgtgaatgtgtatgcactgttggcggaggagtactttacagatatatatagaagcctctcccctttccagcctaagatgcaggggcatctgtaggactgttatgtgagggccttgttccctgcccaccccccactgtgttgggggttcagggttggaggacagtcacgggctgttcccgggtcaggcgtgtgggctcacattgtcgttggatggttcatcctccatggcagcctggatgccgtaggccaggaagcagaggatagccccaatccacagcaggatggagaaccccccgaaaagctgacggcagaacttgacccactcaggggttgtgggaggtggtgtgagggcgttgggcccatctcgagccagaacgtcctgagcccgctggttggtgaggccctgagggagcaaggagaggcgtaggggcacgcatccggagccaacccagccagtcaccatgcccatcccttcagctcccgggcatgggaagaatgcccagaaggaaagtcccacctggttggaaggggtgggggaccatcaggagagaccacatggaggaggtggcatttgtgatgcaacttggagggcttgagggctgagaagggtttgactgggcttgacccctaattatattggattgagacaacacctatggttagggccataacatctcccctggaggcagtctggataagctccctggaaagacacctcaactgttttttccccatctctcttccttcagattattttatcaaggattctaggagagtcctagatttttttttaagagatggattcttgctatgttgcccaggctggagcgcagtggtgcaattatagctcactgcatccttgaaccctgggctaaagcaatccttccacctcagcctcccaagtagctgagactacaggtgggcacctccacaccctgctcaagtcctacattattgaccatcagtgtcacacaactttggcaatcacctgtcactttccacagaaagccttgcctggccctattccctcagccccaggctggttcagatgcttctttctggttccccatggtgttctatacttgattctagagctgcactcaccatattgcattggaatcctaggattgcattttttctgctactagactttgagctcctttaaagcagggaccgtttctttttttttttttttcattcattcattcatttaataaatgtatatccagtgccaggcacaattgtcactctgcggatgcagagatggacaagaccaacaaagtctctgcccttgaggagcttatgatctggagaggtgacacacaataaacaaatacatattagtgccagatagaaaagtgttactaaggaaaataaagtaaggtaaaggaataggggcatagaattttagaaagagcagtcagggaaggcccataaaggagatatacacccactaaatatttgtctgtttgtttgcttgtttcaagatggagtctcactctatcgcccagtctggagtacagtggtatgatctcggctcactgaaacctccgcctcctgggttcaagccattctcctgcttcagcctctcgagtaggtgggattacaggtgcccatcactgtgccaagctaatttttgtatttttagtggagatggggttttgccatgttgcccaggctgctctcaaaccgctgaccttaagtgatctgcctgccttggcctcccaaagtggtaaaattataggcatgagccaccacacccagcattttttgattaatgatttttaaacaaatttttaattgaagggcttagcaattgactgtaccagttactgttcatgtgaccttgggaagttactctccctctctgagtctcctttgtttaataaacaggtctgcaatacctatctcaaagggttgttgtaaagattagagaaatgtatgtaacgcatctatcacaatgtcacatatgtagcaggggcccagcaaatcactgtaaccacaggaatgggctgtcagcccatgtgcatcagctgtcagctctgtggaaggctgtgtgcaactgaagttgcttggggtatagggaagggccctgcctggaggccctctggggcctgggtcatagggagtcctggcttctagggtatacagggagagagctttgggctaggatgcaggggatccaaattctagttctggctgtgccaccaactagctgcatgtccttgggccagtccttgtttctgggcctcagtttcctcatctgtaaagaaggctggattacagttttaaggctcctgccaccttgatgctgcatggttttcttgcctcttttgttccttccctagaagcccctccactcaccttggacaggtccacttggtatttgcggcccagctcatccaaggacagcttgtggtcatcctggggaagggagggtgagttactttggggaggaggtatctaagatgcatatgagggtactgcagggcacaggggtgagttgagcagcatgggggacacggagtttctctgagtgcaatgggctgcagggacagctctcccagcatggggcccctcctccatggcccagcagttccctcaccattgccacctccttcttcagctcatccagttccttctccttctgtttcttcttgccgcccccattctctgccgtggtggcggcaggtgagtactcacggccagcctgagggagggagagccggagagtcagggaagagaggggctggggcctccattcccaccactcagccagggagcccaggcagtgggggtgtgtgttcaaaagcagcggctgccttgggggagataggggggatggagggtgagggaccctaggccctcagtttgtagactattggcagaaccaggggctcccatgtgagtttcagagaagggtgaggggctcaggactgaaaagcaccacttgagtggtttaatgcttgggcttctgctaagattttgtttgttgaaaggaccctgctgctaaatacaaaacaaaacaaaaattttgaaaacctgtatcctacactatttgggaaaattctggaagggagtggacagggttttgtggggggttgttgagggagtagaatcactctgtaggaatgtcttagcccaacaccatggcaattttacttagagaggggtagaaatactcaggaacttgggggagtaagagtctttggggagccaggggattaggcaggaacgtgtccagaggagagccaggtctggtggtggaatggtagggatggaaagagcaggcctgatggactgagaggaggcagtagctggagagtcagggcatgtccaggaagtggagacatggggtgtgctgggagccctctccatcctgctgggcaggcctgcccgttactagacgggaggcaactcacaggactggacccccaaagcacaattgggtaacatgggaactgagccccatttgtcccaaaacataagaaattgtatctgagagtaaatctaaaactacattttatatagtttttaagtctagacattcctgggtcatctggtgaatcagatggcctttttttttttcttgagacagggtctcactctgtcacccaggatggaatgcagtgtgcaatttcagctcactgcaccctccgcttctagggctcaagcaatactcccacctcagcctctcaagtagctggggccacaagcatgcaccaccacgctcagctaatttaaaacaattttctttctttctttctttttttttttttttttagatataaggtctcactatattgcctgggctcaagtgatcctcccaccttggcctcccagaatgctgggattataggtgtgagccactgcgcctgagcagatggacattttaattgtagtcttatgaggctcctgatttcccttccactccagggcctgtgggctcaccactaccagccttccagggtctcacagggaacttcttggggacagggtgggaaatctttccttctaagaggaggccctcttggggtgatagaataggatagaggctgaggaaggcctgggtagccatgaaaagttcccaaaaaggtaccttcttacttcctcttctgccccagtcttctctcctcccacttccctcaggaaatagagtccttgtcatagaggggctgctcagtttccacctggtgcctatttctccactggattctgcaaagtctgcactaggctttcaggaattagttttcccacactatgatgttaacttttgtttcccataaagagtggatacctgggtagggtccacagccaaggtgtttgctttttttttttttttttttttttttttgcaggataatgcagttttgggggttttgtttgcattttaaaaaatatactttttttggagcaattttctggttcacagcaaaattgagtgggaagtagagaaagttctcatatatctcctgcccccacacatgcacagcctcacccactatcaacaccctgcatcagagtgttacatttgctgcaatcatgaacctgcattgatacatctttatcgtccaaagcccatagtttaagtttgagttcactcttggtgtacattctatgggtttgggcaaatgtatactgacgtgtatccgccattgtggtatcatatggaatagcttcactgccctaagacttttgtgctccagggtaatgccttttttacttatcagagtcaggagcaatcccagaagtatggcagctgccttgttcataagaggtcgccaattcagcatcttgagaggtagaagtctgaccagtacaatcagaagcaagggtaggggtgggggatgcaaggagaagtcaacactgttgttcccaagataccaatgatttaaaaagatatgagcttttggaggctgtgttgctcagaagtgctcttctcagaaaaggtgaccagtaaaatcgtgggtttgtctccacctgaagcatctatgaatctggtataattttggcctcctaaaggcagatcttcttggggagaccgagcagcccaatggaaggggtggggaaaggcttgtgagtggttctgcctctgcctttctcaggtgacctaagaggattcatttaattgagtggattgaaatgctttacattcactaactgtctgtggtgggacagagctgagaaaaggaagaaatgcaatcaagggaacagaggcaagagatcaggctggctgagcttcagtgtgaccctcaggaacttcagggacagaagggggcccaggcatacacagaggagcagggctgggtctgtgggcagaagagcagggtgcagaggaatttctgtatattcagatgtgaaataaatttcataaaaattggaataaaatgcatgctttttaaaaacttgctggtccatgcactttggcatgctggattgtggctgagctaagcagctccacgcagtgcctccttttcccaagctcccgccctgctctccagcaggcttagagcttgagacacactgccccttccccctcctcctgtcctggcaaagatctcaggctctgcagccaggagcctgcagagatttggggccagcggctgcccaggcaagaaagaaagagaggaagcaaggacccccccaacctccctccactcctccctcccccaaccacaagtccccctctctgggtcttgaatgctgaaggagaacagagagtcctttttgagaaagccagaggctgggacagagtgggggcagctgggaatccgccaacgctccccccatctcagcctctccgtggtagctggagcaggctgggctccctcccaccagtgtcgtcccttcccccaactcccacgctgcccttcacagccactgggtaatggggggacagtgaagcctgcctctgcagtggagatgcaggggagaagggattggaggaaaaatcatccctagaacaggttgtgggtgtcagatgccttccctcttcaggggtcgttggtaggttgaactctaagctccaggccctaaatacccccacctcacccagcctcttagtttaaacagcccagatctgctcctcatcttgctattgcatcacccacagcaacttaggatggtgattaaggggagtttgggggtgctaggggaaaaagacagactggaaaagtcaaggtctcatcacttcccaagcaagacctcctgagctgggtctaccttgctctaagatggagcagggtagggggctacctcccctccttctctcttcacttggatgggggaaatggagggcttatctgatcctttaacccctgcctcttctcagaggtcctgcatctcagctagggatgccctttccatggggagccagagatgtcaagatgcagctgaaggtcccaagacagtatatcttcctgcagctatgacttcttcctccgtgaagcccatacctcacagctcctaagggcaggctcacagactctcaagcacccccacacagtgacatttatgcttgtgcaggcttgaaggcttgtacatttacaaatttgcctgctgagacacaaacacaggtactcatccatgagtaactgcaggactccccgcctatggagaacacgtggtcaaggacacacactcacacacacacagacacagacacacagatacatgcatgcactccaattctatttatggctccaaccctagctcaggaaccctggtgtccaggctcaggatttcccagctgctcaactaggtgcaataacatgtccttgcctgactcctcctgggcccagaaacacccacggctccccctaggcacagtcttcctcataccctcctgttccgcagcatgccctttccctctgtgtcctcttttgccagtattccacaaaaggaaagcagccaggcacagcatgtaaaaggattgggccactcttctccatatgggaatttcatttccaagaattcaaagccctctccctgcccgccccattgttgttaatcttcctcttggtgtagccattgctgcagaatgccatggacgggtggactgggggggggtcactgtcaccagcctctgggaaagtcctcaaagcccatggcttggaacccacggacaatgctgctcgggacatccggaggggtgctggggtgggggctggggcatcattcttcctccccacaccccgcccagctgtccttggcactcagggcccctggagctggtgtccggaactacttggtgactctgggagccggatgctctactgcccctctctaacctcaaaatggacccccagcctctcaggctaggactcccagaggaatggatattttcaggaggtggcaaagacaggaggactcacagtgccaaacatcctttcagctgggaggccgggagatgcagtgagaggagggactgctgcagggaaggactagagatgtgggagtggggtggagggagagatggagggggcatgtgtggtgggctgtgggtctaactgtgggcagggggctggggcgtgcagaggagaggagagcactagggtatgtgaccgccgtgggatctgtacacacattggtagtttggagactgttagtttcaagttccaagtatcccactcagctcctctctcccgctccttccacatcccattcccacttcatccttcctcagcagcctccctcaccctctagactgcgacccctgctctttagggatactcaccccacggcccatcttggggcagagtggctgagggaccttagcgggagaggtcaccaggaggatcccaagcccacaccagcccgtctgggacagtcggagaccctggcagacagagaaagccaaagcaacagggtagctttaaataggtccttctccccctctcccccgccttcccctcctccgaaagaaacgtttgttgaaacaggatccctgaggactcctcccctcccgcccctttagccactggccctagacagcccgtttgtcccacggcatgcccccccttggctcctctcaaccccctctggcctgtggcactcacaactgagagaggctgcaagggaagggggcctgggtcccaggttggggggatatgccccctaggatctggctgaaggggagcagttgactcagaatcccaggatgacagagaccatgtggcctaactcttcttttccaagtgggtaaactgaggctcagagagattaaacaatttgaattgataagacagagccagaactcaggtctcccgagtctacatccaatctcccagagaaagaaagaaacatagaccactctgttccttctattatagaggttgcagggacactgaagcccagaaatagaatttgaaccgaaggctgacctctgcacttgaggcacctggaaggggggcccaggaggagtcaaaggtggctcgggaggcagcgggaagtttggagatggaggcaagagggtgtccccaaaccctgccagatgtaacctctccaaagttttgaaggagaatcaagactctggtagggaggggcaggccagggctagaggggaacgggtgggactcctagcaggcacctgatgacatctctgggttttgtttacccctcgtttaccgtttcattgctgttgaagagctctagactgaatctatgcctgagtagagtagtgatagggagaagtcaaaagagaggaaaatacagaacctctaagatgtgtgtgaaggtcaatatcatagcaaatatcagacatgtgaacgggaaaggagagcgactgtttccttcttccagtggggaaggggaagcaaagctgcagcatgcaggactgaggctggagaacaggcctctctgcagtgaagtgggggagattggaaatgtctgaggagtgaggatgcccatcagagtcaggagcaatcccagaaatgcctaaggctttgcctggggctggaaagggtatctttaaccttataccagctagaaactggggacaacgagatgacccaggacaggaccagctggtctaggggtgttgttgctgctcatttgatgagtaatccaaaggatgaggggcacagagaggaaggggaacccagaaggggcagagagaaaagaaaaaattctgctcccgccttctactgggaacagtcagaggacaggattcccctggagtacccctgtttctctgggcacagagatggagtgaggggaagccagcggagtggggcaggtctaagtgtcctgagtgcaaagaaagcagagaggaagggagggagggaaggggggctttggccagaggcctaaggtgcctgctggctgggctgggtccatctctggccccagagggaactccctgcagagggattatcagcctctcctctagcaaatccactctcagggcacaaggctaacatctgaattccctaaataactggccccctccgggcctgcagttgagattttccattacagggacctggtaggtcacatctcacttccacgctccttccctctctgggttacagtcagaaagggtgggtaggatggggccaacagggccttctcatggcccccctctccgagctcagatttggtcttgggagagaatgggcagagggaggaaacaatgaagggaacagataccagttcagcccctgtgtgttaaggagagagtgagaggggagtagcgggaaagcctgtggttagacaccaggagagactgtctaaagcaaagtcactccagagtggccccgaggcagctagggagatcaacattggggcaggcttgcctgggggctgtgggaacaacatgataaattggggtttaggaagcgcctgttccgtaggttcctgggttggaattcctgggtaatcttctgcccagccctctccagaacacaacctgagataggagagaaaacgtcagtccccgaatctgaaggtgtgcaaacctcaagcactctaacagttttcatcccacccctcacccctgctggcacctcccagtactgcccagtccttccaaaggccctggctctggtccctgtggccaaactcaataccggaaaggatgtgcccttcctctgcccctacagcctgctggggctccctgccatgccctgcatttgggcgagagcacagcccgaggggcgctgctgctcacatatttagggctcagagaaatcaaagagtgggcaggacacccagggcctatacttccaccgtgcatcactgaccaccctccttgcccagtgagagctgaggctctggagtggtctacctccttcttgtccaccatgaacctcagcctccaggatattaacaggtgtagacacctgatcgtttgatctggagtgcctgggttgggctactgtttcttcaaacacagtcagcagtaccagtttggatcaaggcccttggagtaagaggagcaaaggagagagaaagaaagacttgaaagcaggaggatggaaggccaagatgcctgggctggggagtgggctgagaaagtcacagatcaggagggggatccaccaagggcaaagtggggatggagtggtcctgaatcaaatatttggttggtaagaagtgtgtgtgtgtgtgtgtgtgtgtgtgtgtgtgtgtgtgtgtgtgtgtgacagagagagagagagagagagaccaagacagttggagagagacaggagtgtgcatgtgcctgtgtacagatgtgtgctagttaatgactgggaggacctgagcgttgggtcctgtgtgaggtatgagacggagtggtggtaccaaaccacattccaaaggaggagctcctcaggggagaggacaacactcattcggatgtgtggccaatctgctatgaatcggttgtctgtatgcaagcatgagtacagaggtgcgtgtgagtccgtgagtgcgcatcgcttctcggccttttggctaagatcaagtgtggagtccgtgtgtgcgtgcatgtgggccattggggagctcatgtgaagccgggtgtgggtgtacgtgagagtccatgggagaatgtgtgtgtgcacagggagggggtggggacgctgctcagctgcagatgggctttcaaggtctccaagaaacagttttgtttcctaagtgactggcctcctggggcctccagcccagacttgaaggttgtttcaagatcatgaaagagagagaggaggagggagagtgggagggaaggaagagctgggaggctctatcacccccatcgtccctcctcccgccccggcaccccacttctctcccccagtcctgatttgggcccagctctccagccctgctcctctggtcctcctctcggctgccaacccccctctgggcatctctccttcttctccttcttccattccctctaactctcctttctttttttctttagggcctgtggtcttgtcactgctatcaggcttctgaggtcttctgggagtgtgggtggagtttttctgcttccaaagggagcccaccttgggggatgagatgaggggagccgggaaggcctggactggccatgacaagtgtccaagaaagatgacttctcactctccctgcctctccagccctctgtcctcccactccctcaggttatagtgacctgttaaaaggttgggatcagccaggtggggtggcttatgcctgtaatcccagcactttaggaggccgaggtgggcggatcatgaagtcaggagtttgagaccatcctggccaacatggtgaaaccccgtctctactaaaaatataaaaattagctgggagtggtggcacatgcctgtaatcccagctactcggggggctgaggcagaagaatcgcttgaaccagggagtcggaggttgtagtgagccgagatcgtgccagtgcactccagcctggcgacagagcgagactccgtctcaaaaataaataaataaataaataaataaataaataaataaataaataaataaaggttgggctcagagccccagagtggctgtccaagtcctgctgctgtgtcagtttcctcactggactacaaggatggtgttgaattttctccccatctctcctttaacatctgctcctccgttttctttttggtctttcttttatttttatcttattttttttctttatctgttaaaccattccttcaacatggtctttcttttcagtctactcaaagtagattctaaaaatctctgctggctgggcgcggtggctcatgcctgttttcccagcactttgggaggctgaggtgggtagatcacctgagtccatgagttcaagaccagcctgggcaacatggtgaaacctgtctctaataaaaatacgaaaaaattagctgagcgtggtggcatgcacctgtagtcttagctactcataaggctgaagtgggagaatcacctgagcccagggaggttgagaggctgcagtgagccaagattgcaccactgtactccagcctgggcaatcgaagtgagaccctgtctcaaaaacaacaacaacaacaacagcaacagcaacaaaaaacaataaacagacaaaaaaaaacaattcttcttctctctcccttaaaaaaaaaggacagattctcactctgtcacccaggctggagtacagcggcatgatcaactgcagcctcgacctcctgggctcaagccgtcatcctgcctcagcctccagagttgtgcatctattggcatgcgccaccacacccagctggttctgtcattttaatctctccccagagtatttttattatcctctttattgttaaaaccacactgtatagaatttagaaaataggatgtaaaagcacccagaagcattttccccagcctctgcctgtgctgcattcccacctcctttcgttcttacttctctctggattcagatagctccatgttgtgttctgcctgtgccttcttcacgtggaagtcccaagggagaaaaaggaaaggacccatggtgtagcccagggaacccatgtcaacccttcccaggagcatgaaggcctgggctattctgtgcctctgctttccctcctgtcctctcacagtccccaccgtggtccaatgcaatggactcttgcctgaaagtcaagtcagctgaggctagtcctgctgaagccactaaccacctgtgtgatgttggacaagaggcttctctactctgaccttggcatcttcatctgaatgacaaggaacgggatgagaaaatctgtgagtaattccagcactttgggaggcacgaggtcaggagattgagaccatcctggctaatgcgtgaaactccatctctactaaaaatacacatgcacacaaaattagctgggcgtggtggcaggcacctgtagtcccagctactcaggaggctgaggcaggagaatggcttgatcctgggaggtgcaggttgcagtgagctgaggttgcgccactgcactccagcctgggtgacagagcgagactctgtctcaaaaaaagaaaaaaaaaagaaaatctctgaggtccctctccagttctgatgatccccaaattccaggctatttctgcctcagcgcacagctcagctcaggtaaacagcaggagttacctgcaggttgtacctgtgtgagaaccatcagttggagacctgggttcagaaggagatccaagagggtaggttgtcctgtcttgtttgtgagcatggaggcaggtgctcctattttgtttattattatgactcatagaaatgaatcgaatccctttaactcttggcatggaaaaaaggaagggctccggtttgagcaaaggctaccctgggttcttacagagcaccgctgtgagaggtgggacagggtctgggtatctttgggggaggaaggcagggctggtggtgagactgggaaaacctgacatctcttggctggtatctgatcagcaaataccaggggagtctgtttgcaaagattctttgggctgggaaaagtgtgttgaggatatggggaggacggggttaatgggccctgctgagtgtgaggagcaagggtcacagctggaccctccagggttcctgttagcctttgattccatccgggcagggagggagaggtcccccagccccctgaggcaggtttgctttggccagagatctgaaccaaccactggcccagagcaccccgcctccccgctccccctatcaagaggcagctggcttggcccccagcctccttcttcccacctccctcttcccttaccaggccccctccacttggcccaggatacagctctgtttatctgcctgtcccctgtggcattctgtatgctcagagagttcaggatgccctgcaaacatctggcacacagggccactgcctccctcccacatagcagcctctcctcggaatttcagggagcttggcctcctctgtgcctcagtgtctctgaaagtccaagattcttttacttttgtgctcccctctggatgttctcaccactgcccccttgaggaatgtgagtgccctctgggtgacttaataaacagaacatgtgctttttgatgttattgcatcatttagacattcaacaaacatttgttgagcacgtactttatgctatattctgtgcaaggtactagaaagacagttacaatcaaggcaaacaagatccccaccctcattgtcttttctctcagaatctcatgccatttagtcacaaaatccccccatccattcttgaccttgtcctcccaagctcatagtccttagggactccccacttccatttcctcaaactttccccacttctttacctctacttttgctgagtgaggttgagtgggcctggctctgcctcctgcctagatgattctcccaacccaatgacgcgggagcaaaggctgcgcaatggcgtattggaaatcgtattggaaatcactctggattaggctagagggagggcagaggctttcagtgtgggacttgctctacagttaaccagctgtgcgcacttgaataagtcctttacctctcgtcaataaagtagtgggtggagggttggactagctaaggattctcacccttagcttcatgttaacatcccatgcccaggcctcatcttcaggtaccatgtttttaattgatctaaggtggggcttaggcatcagtgttttgttttgtttttcgagactgagtctcactctgtcgcccaggctgcagtgcaatggcacaatctcggctcactgcaacttccacctcccaggttcaggcgattctcctgcctcagcctcctgagtagctgggataacaggcatgcaccaccacacctggctaatttttgtatttttagtaaagacggggtttcaccacgttggccaggctggtctcgaactcctgacctcgtgatccacgcactttggcctcccaaagtgccgggcttacaggcgtgagccactgcgcccagccgcatcggtattttttttaactccccagatgaatcaacaggcagatttgagaaccactgaactatattgtccctaagatctgtagctcatcatagctaacagttagtgagcacttattgtagattgcatgtttgtgtctccccagaatttacagattgaacctctgatgtgatggtattaggaggtggggcacttgggagataattaggtcatgagggtgggattagtgctcttttaagaggaggcatgagagagctttcttcttctctctgctggccatcatgtggggtacacagcaagaaggtggctatctgcaaaccaggaagggacccctcaccagatactggatctgccagcacctggatcttggacttcccagtctccagaactaatgaagacagcatgtagtacttaacttagtcctcacaactctattttacagatgggaaaactgaggcacatagatcctcagcttacccaagtaggggggctgcggttcaaacctggttagtttgtttccagagcctgcacatttaacttccatgctgtaaggacccactgaagcttctcctttgggttcttgtccccaggagtaaatgaccagaactgtctggatgcagtggtgacagtgaggagtgctccagaagataaaggggaagaaaaagtgccaactcttgtgcatctgtgttgagccaggtattgctggctgctggttgctcaccatagcatttagagggtggtgggagcccagagaagggggagatggttctcagttggaagaatcaaaaaggtcttcatggaagaggtggcattctagttgggcctggacagataggtaggatctgactcagagagataaaggagaaggaacaatgtgagcacaggcacagacagcagaagcactctgcacaaggaaggaatatgggcggtactactggaaatagatgttggagccatttcatggagggccttgaatgccagagtaattgccactctaattgctagtgtttcctaaaaaggctctgatgataagaatcacctgggtgcttgttaaaactataaaagaacaggtacatttcttcaagattctgattcatgagggtgggcgtggagagtgggaacctgtattcctaccaccaagcaagtttgagaaatatcgctataaacaatatggagccacttaaagtttttcagcaggggagtaatctcattgaaattgcgttctaggaaggctcatttgatggcagggtgtgtgcctgtacgtggacgggatgttgggctggaagggagagactgatgggggctataggtggtgaaggtctggagcaagacagagaggagacagggatggatgaaaaagatgtttgggaggtagaatttcagtatttggcagctgattggacatcagagtaaggaaggaagccgttggagatggtgggggtggtgaggacgttggtgcaaagttaactaaaataagggtaggggagaaaggagattgggaaataagccgcaagtttgcatgggggcatatgaaggttgaggtgctccaggcagggcttcagatgaaggcacgtggggggtgatagaaatggggactggagcttgggagagggcatgggccatgggaatcccctgcatggaggggaacactgagccaggagagcagaggagatggcccaggcaggggagctagaggacagaggtctgaggatcctgggtagtaacacctatggtagaggaagaggatctggaagatggcaaggtagggaagccagagagatggagaattaggccgagtagaggggccaggaagctgagagaggaacaagttttaaggggcaaaaaactaacagtttcagatttcagatgccagggggaaaggaaagctggtcacttttttttttgtcaactcagaggtcactggtgtgtcctttgggaaaaccatttccatgtcaggttgagtttggaaataaacctgtgaagcgttgaggagtgtggtgaggaagctgaggcagggcgtaggttatcctctcccaaggggattgtgggagatggaaggggaaagaagactgggtaaactgagacagcagatggaggaagcagtgaacagtagagacccatttagaagtctcctctcctttgccactggtcccactgcgcctgtgggccctagctttgatcataatggggcaccatgacacacatgttttcatttcatcttcacaacaatccttaaaaaataatgagatcggtactctagtaattctcactttacagatgatgacactgaggctagagaaagtgagtaacgggattcaggctacacagctggcaaattcaggtctgtgctgtctgcttctgaaatcccagcccccaagctttttacttaattgaaaacacagaagctttatttcttacgcctgagctcctgattggtaacctggctcatcccctgatttccaggttcgttctggccagtcccctttccccagggctatccagttcaggagctgggatccttcatgccagtgctcagggcctcagtaccagctggattccctgtcaccctgccctgctggctggttggacctctacatctttgttgtctcccagctccttctgaggacaataatttgtatggtatagatgcggcccgcaacatggctgaaggcttgtgctgtggagtcagaatgcccggagaagaaatcctaggtctaccactaattggacacatttttttttgagacagggtcttgctgtgttgtccaggctggagtgtagtggtgcaactgtggcttactgcagcctcaccttcctaggctcaagcaaacctcctgcctcagcctcttgagtagctgggactatagttggtgcccaccatgtctggctcgttgtttgtttttttgaaaaatttttagtagtgacagggtcttgctatgttgcccaggctggtctggaacacctaggctcaagcaatcctccggccttggcctcccaaagtgctgggattacaggtgtgagccactgtgcctggcttgggcaaattttttagcttttctgaacttcaattttttttaacagctctaacttatagagtcattttgagaattacagtgcccagtgaaggttagcaattattttatgcccttgatttccaatgtcctggccttcagactgtgatttctttttcagcttgatctgatctccagcgtccttcccgccctacaggacagaactcagcccttcctaggctgcttaggaagccagcctggttgtttcctgaggggtggaaggttcaggttctgaaataagaggaggaactttctatcagctgtagatggaagtgactagtgtatgatggactccagaggaactaacagtgtccactgtggaggtgacatgaccacaagagaggaagggcccagattccttctcttgtcactcggcgtgtcctcacttcctcagtcacacagcaaatgtctgttgagcttctactccttgccaggaaactctgtaggctttggggaaaggcaaaaaagagttaacagtggctttgagaagctcacagccaggatggagaggcagatataaacaagcactgtaattacaatgcagagtgggaaactctaccaaggagctgagaacagggtgcagtgggagcaagggggtgggtcgcgttagcatcaaaactctgggcccccgctctctcccatggccagctcggtcacccccactgttccatctgtttctttgttttttcagagtctttatttctggctttgttttcccttcactttcctaatagagagcctttggaaaaattccacccttgtttcagttggaacagggaaaaggagaattgtctactcttcagccaaaataaccaaggggtgccgggttcctggagagtccaggtggacaagcagaggaagcagggactgtcccgagggagccaggggagagcctgcagcgcggcaggcatggggcagggagaggtgaaaacacaggatgagctgtgcctggctggaaggcccaggtggctgtgtgcctcgagtcctcttccagagctctctctgcatctcctgtcctctgttctgattggaagagagagttgagacttcttccacttcagagaatcctgtaaagcctggttacattgctcttttcccacccaggtagctgtgaagggctgggaccccagagttagaagtgagtctttgacattattcacagcagagggctgtgtatgtgtgtgtctgtgtgtgtgtgtgtgtgtgtgtgtgaaatccctcctttcccctccctctttccccataccaccacacacacaacgctcattgttccctgggccttcaattctgcattcatccattcaacacatatttattgaacactcactatgtgctggaagctggagctgtgtagtggaaaaagttatttcagaaggttgcataggcaccagatatgcatgtgtgtgcctgaatatatgcacatgtatgtatgaatcaatgtgggcaggctagggaaacaggaggaagaagggaagaagaatgtttgggaaactgaagtttgggcatcaggtagcttgcatttgcatctgggtgctaccatttgctagctgtgtgacctcgggtaaattatatgagctttctgtgcttctgtctcccagctgtaaaatagagatactcgtagtattcacctcatggggttgttgtgaaagctgaatgaatgaatgtgcacagagtgtgtgcaacggtgcccagcatgaagtaggtgctctgtaggtattagtaattgttcccttctcaccccactcagagctgggtggagacaaactcgtaaatgactggcagtcacctggtgctacccacctcctgccccctgaggctcatctacaacactcagcccacaaacctctgtctaaccaaaccactgccatctcctgcccttggctgacccccaccccaccctaggctgctcagggtagagaagaagtaatatcacacagtgggggttgcttcagtcccacgctaccctccagacatatatctgagctgtcagttccctcttagcagactgggaatggagaagtgggatgggtgagcatctggggcggagcccaggctcccagcacccacccgatgggactggggaacaaagaacttgtcaggaggtcagaagggagaccgaggggattccagctctgaggaatccatgtgtggcatttgagcgtgggtggcagctggcacgaatccttggttcagaactggcagggccccctcaggagtcagggccaggtcgtgccaaagccccagtggcatcgcggctctgctattcctgaacagctgtgctgctccccttggcatagggttcaagaatgggggcaggagtgtgggcctagccagggaaagaggagggttcagagagtagacacacacacacacacacacacacacacacacacacacacacacagttcaccatgaaggtgcagatgcctggctcagggagaaaagaggggagggagagggtggaaagcgaatgtgtgtgtgtgtgtcgggggggagatggctttgtggttctgtgagtgtgtttggtgtttgggtgtgcataatgtctctgtgtttatctttgtgtgtgcacttctgtttcagtgtgtctctgaatgagtttgttatcagggcgagggtaggtttctgcactacttctgtctctgactctgcttgagcctctcagcaactcagcagagagaatcttcccttctgggagggtgggaaaatatagctcatcagggcagtatgggccaatgctttataaacacacacaaatcacaggacattcttgtgtgtgatccttagctccccacaaagctacggttgatacacatttaaaagagagagagctgagtcctatgtgtatgcttgtgccatttctatatgtctgacagtctgacgagcatgtgtgcttatgtatttgatgtatttgtcactttgtccccacggcagtatctgtgtctacagcttggtgtatactcatgtgtgctaagcccatatttaactgtgtccctagtgacgtttgtctttaagcagcaacataacaggagttagaagcacaggctccacagtgaggcgatccatttcgaatccctgtgtggacagtaactaatgcattaaccttggacaagtttcttaacttttctatgcctcagttttctcacagggataataatagcacatgaggataaatgagatcacatttagtgcctgacacaggtcagcatatgtgaatggtcctgtctttgaacgtgctcctctctgagagctgtctgcttggttgtgactgtggtgtgtcacatctcagctggattataaactgcttttgggcagagcctgggtctcaattatctttaacaatactcatgacacctcagtgtcaccttggtgtcttgtgtatatgtcatcttgaggtgaaatgagacctgtttcatgtgaaacaggacgggtgtcggatgcaggcccatgcctggggtagtacatggagggcaggtgggaagctggtgatggcagtgacaacacagcccagccgggcatcagggtccctcatggtcactactgcatacctgccaggtctctctgcaaacccaggctccctcctccttcgtgtctcagtctggcctggaaactcactgaagggcttccttcctcctttctctgctcaccccaccctcgggcaccagcctaggtgtgtgtttttaatggatgagatgagtgccctccaatctacaccatgcatcgctgttttgcagcttgtgtgtgtttgcccatggctctgtgggggtgtgtttctgggagccgtctttctgtctgatccccgctccattacagtggggacatgtgtctgtgtgtgtgacgtgcctcgtgcctggggtttgttctcctcccccagctttcccagttacataagcagctgaggggtccgtcaggcctgggctgtgggctccctctgctggccgcctctggaacccgcagtctgggttccagaggggcctgggttccagaggggcctgctgaagacactgttctctccttgggccttatcccctctggagggagacaccaacccagttctcaacgccaacctgcccccagctccttcccagccccaggccacagggtaagagaggatacctcacctccctgaagacccctctcatcatactcatactgggggttggttatgacttgtttatgaaatgtatccctaacatatagaactatgttccctgagggcaggggagcaggcccaccttgtttaccatggcatctccagtgcccagtacaaggcctggcccaatcaatatttgttgaatgactgagtttacagggtggagaggcttgggaggagggacagtgaggtgtaggaagatttggggctttggggacagacagacaagcctgggctgaagtcacccctaagccacttaaaaactgtgtggccttgggcaaggtacttaacctgcctaacctcaagtttctcttctgttaaatgacaccaccttgcaaaatatgctataaggactaggactaatatccaaaagggccttcttgtgtaagcatttcataaatgacatctatcattattacaattggtaacatctttcatccctcaagcatcatgaaggcattaaatccactcgataattaaatccattataaagggagagacgtattcttccaaaagcttcccctatgagtttcagttttcacatagctcgatatgcctgtggatggatttagatgatgaggttctggagcaaccttctggatatttcaaagtgggaataaacaggcaccttattgccctgttcatgggccagtgctggcagtcctgggaagtgagggctggacctctgatctcccttcaaggcctcagtttctctggtttctccagggttcctcaatgtggcttctactggcaaccccgtgagcatcttctcagagtcaggcactgtgccacgcttgaggaataccatgtcaaggaaggtctggtctggcctgtgccacttaccctctctgggcctcagtttcctcttctgtaaaggggggtgagtgagtgggagggaagggggatgagaggggagagggaggatgttggagggtagagggtggtaaatgggctctggggtcacctcccactgacagccactctgacagccttggctttgcaaacctggccatctcttctccccattctggtctcatccttcctgcccctgcccacttcccatctttacagttcaggaagagacagagcacctgggaagggtgcctcctccattctcccacctccagggcaagccccactcttcctagaacagagcaatgttcatctcttcccactgtcactgaacatagagactccttcacctaaatgccaggtctaaactaagcctcttaggaagcagttcaaataataattcaaaacctaaaacaaaataatccttatctcccattttgtgttagtttcctgtgccaaacactttatgtacattacctatcatcacaataaccctttgggtgatgtgatcaacctcaattcaatttgcagaggagaaaactgaagttgaaggaggttaaacaactgggctaggatcacccaacccagaaatgacgtcacatggacggccccctctcctaatccatttttcttttggttttgccctctgagggggtgaaaaacaggtctccagtgaccttctggatcctggaagcgcccttcagctcaaacccttcgcattcaggaactcctggcttccgccaacccctacttcagcagggtttgcagcgaggactatggctcagagcaaataactgaattctaaatgcgtggtcacagtcacctcgccaatcccagggaccctgcacccaactctccaggaaaggctggcaggtgcggggtggaatgcgctctgtgcgagggtgggtgggaatttcgatgcgcagaggtgcagttagctcactcctgcgggggcctcgggcggagccagggccaggggcggggcgaggccggggtccagggcggagccaggattggaggctgacgttagccctgcggggacggggaaggggtgcggcttgggactggggcggggccggggcccggggaggagccaggattggagtccgactgtagtcctggnnnnnnnnnnnnnnnnnnnnnnnnnnnnnnnnnnnnnnnnnnnnnnnnnnnnnnnnnnnnnnnnnnnnnnnnnnnnnnnnnnnnnnnnnnnnnnnnnnnnnnnnnnnnnnnnnnnnnnnnnnnnnnnnnnnnnnnnnnnnnnnnnnnnnnnnnnnnnnnnnnnnnnnnnnnnnnnnncgggcctagacggggcggtggaaggggcggtgccggggcgggccggggcgagaatggtttcagaactgccgagggctggagggaaagcagcgggaggggcggagggaggggattcggcagctccagttcagctcgctcggcgcacccacgcctcgctgccccgcttcctgccctcaacctgggcatgcgccccccacccttccggccccccagaacccgcgccatcccccggagcctccccagagctggccgcgcaggatgggcgccctcaggcccacgctgctgccgccttcgctgccgctgctgctgctgctaatgctaggtaagccaggcccccgttccggttcccggccctgccgggcaggtgcctgccatccagcacccccctagcatttcggggctcctcacatcctcctccgtcaggggtacctccagcctccccggggtcggcgtccagctgcgctttgtggctgtccgccgagccagtcttgggaagagtgcaggctccccagctctaagccagggactggggcgtagagaggacccactaaggtgctgccccaggcactgctcggcctcccggggcaggccacacatctcagctagcatacccacgtactggggtcgctgcaccaaatgctgcgactcctttctgccccacactcagctccaggcctggccttgggtgcccgccctacgagggcagtgcctgcccagcttcataattgccccagagttggctggaggcccagaggccagttctgcccacgatctttgaagtaagtctctcccagttgcgctccacgcacttcatcaactgggggcagttccctctctcacccccatctccaccctgggttgggtccctctttgcccttcttcctgtctcccaaatggcacttggctctgcagccacccatcagttttcacaccgcttagttccagcttccttgcctcaggagaaaccaggttccatggagactgatcctgggatctccaagcaccttgtgcctgctgtggtgggtgttcatggtggggtgttctgggccaatcttgcatggatgcatggggataatgacagtggaattgtttttggcctgaactggagggctccctgtaggaggtggtctggggaagagtatggcatggagacagtgaaactgccagtacagatgttgatgaggctgaagcccttgaaatgagagtgaagcgtgggggtggggatggtgacttcagagctgctgtcgtcaaggcagaggctgaaggtagccccagctgcctgtttctagaccagagctccacagtggcaccaagcaaagccttcccctgctgcaggtccctgggccctgcagggttaggatgagtcctctccctggtccctgggcaggtggcaggaggatgtacagagaggaaggcgctgtggggcctgggttgcctagcacttggtgtgttttccccagtgggcagcatggagcagggaggagcccagggaggtggggaagtgctggcctgtgtttgaaaaaggagcacgcagaggtctgagcacccactgcctgtgggcacttacattcatttcacaaatgaggaaaatgaagtaacttgccccagagagcacatttagtgagtgttggggctaggatttgaacacagatctgattccaaagcaggcctctttgctgtccctttccttgctgcgactgatacagaggaggggagagagagctgtgtggcaactgatttcctaaggctgtggaggtgactttcccatgggcatctccaagcatcagcagttgtggagccaggaaaatgggagggggccttctgagcagtctgccctgaggcagtcagggaaggtgtcagcttggctgtctccaccgtcactctgattatgaaacttgcctggcctggggcagggctctcctgagtcacatacgcactcacacatggtcagagctggagctcttagttctcctccagtgtggaaactgaggcctaggacagaaagagactggatcccaggccacacagctgggcatggggatggtgctggaatcccacttcctgactggcagctgtgcccttaacaacagaccatgagttctccctgtgacccagccagaggatgaaggaaggggctaggagcccagaagcaggggtggggaagttcagaggagccgttctagagaagctggagggtagagtttgaccacagactcctgggcattttcctctagctcctgcagaaagtccatggtatccccctgggaggcctaaaagtgacactctggttggtgaggtcagtcccttcaggcctggccttggagtttccccatcttcctctctggttttgcccctctggaggagtgtgtggaagccatctagggacagcatgatcttggctaacatattatacttttcctgccttacctttctcatctgtaaaattgggagaggtggggaggggtggcctagccctctttacattgaggttctgtgatcttatctagtgggagctatggaaggaaagaagggaggagctaagccctctaagtctgccaggagtatctgctggggtagggttgggcataggggtggagtagggtgaagaagagaggtttggcctttctgaagggagagagatgagaaggggcagctggggatttagtgcctccctacagaaagagagccatatatgtaaatgaatgcataccatgtgcaaatgaaggcttttgttaaggaactggggcaggcaccttctgtatctgctgggctagcccggaaggttggcaggcactggaggaggggatcttctgcccccaatggccagggcagagcctggatcttgccccagaagccccagctgcctgggcagccctgtggggtgagagaagcagtgagctcatggcgcagctggagaggggagggcattgtgtggtgagaactgactgggcctgtgccctttccagctagggtcactggctccattgtctcgcccaggtgacacagctgagccaactagcacttctgagcaagactgccagctcccctcaagcaaaggagagggacatgtagtctcagagtcccctagccagaaggctccccttgccaggtgctgaggaaggaatggcagacatggaggtgggtgagtggcagggacagatcaaggttcagttggaaccaaggcctggttaggtcaggaatcagatgtactcctttctgccttcaggtgctctgcttctagtccgccagaaatgggatgcatctggatgccaaggcaatcctgggcccatgccacctccttgagatccaggtgtcttatatcacagcatccctttcctattctcagaacagggtccaagctgtggacaagctttcccaggtctcctttccttttgtaggcagagatcaagaatggtgcttgtggcggcagagggcatggaatgaggaaccaggcatctccaactccttctgcctttccctacaggaatgggatgctgggcccgggaggtgctggtccccgaggggcccttgtaccgcgtggctggcacagctgtctccatctcctgcaatgtgaccggctatgagggccctgcccagcagaacttcgagtggttcctgtataggcccgaggccccagatactgcactgggcattgtcagtaccaaggatacccagttctcctatgctgtcttcaagtcccgagtggtggcgggtgaggtgcaggtgcagcgcctacaaggtgatgccgtggtgctcaagattgcccgcctgcaggcccaggatgccggcatttatgagtgccacaccccctccactgatacccgctacctgggcagctacagcggcaaggtggagctgagaggtactgggccctgggacggggtggagccacacaccctctcaaggcagaaagtcaaggccacaagtgacctatctagttgccccttaggttttgtagccaaggaacttgaggcccaaagaggttaagtgatttgcacaaagtcacccaataactcagtggctgatgtgggactcaaacccagagttcctcacccaggccagtgctcatcttatcatattaagacccctcctgggagaagaaatgtccttaagttgtccagtccactttccattcccaagaacgaagaagactgttgggttgaatagcctctactcctggacagtacaggacccagatctgggaaagagagtagagttagggaaggagttagaccatgtgacattctcactctcttaagtttctttgtcttctgagaagaaagagccgcttttctcagtatttcaaacagaggtcagtctcaaacataagggtgagtaggcgatgggctggttctatgaaattctacaagtatttattgagcgcctgtgctgtgcccagtactgcccttggcaccactgagttacagaagaaataatacaacatgcgatctttgccctctgggagctcacagtttatttagggagataggctatacacaggaaacagtaacaagggctgccagctcccagccctccctcactccagctgttctctccagttcttccagatgtcctccaggtgtctgctgcccccccagggccccgaggccgccaggccccaacctcacccccacgcatgacggtgcatgaggggcaggagctggcactgggctgcctggcgaggacaagcacacagaagcacacacacctggcagtgtcctttgggcgatctgtgcccgaggcaccagttgggcggtcaactctgcaggaagtggtgggaatccggtcagacttggccgtggaggctggagctccctatgctgagcgattggctgcaggggagcttcgtctgggcaaggaagggaccgatcggtaccgcatggtagtagggggtgcccaggcaggggacgcaggcacctaccactgcactgccgctgagtggattcaggatcctgatggcagctgggcccagattgcagagaaaagggccgtcctggcccacgtggatgtgcagacgctgtgtaagtgccacttatacatcccactgtgggagctgggagggacagtatcctggtgggcactgtggccacagggggtaccagatagccatcatctgactccaaggaactcatcttccacagagtgagcagccttgctagcatttctctcccccggcccttgatgggttttctctgctcagaaattgggtatagagataggaggcccatgctgaggggtgagattcaagcccctaaatagaaagatggtcatacctagtgagggggagacaggaggttttgaagttgctgctgtcaagtaggaaacaggaagttggggaatcgggtgcctctgtgtcccctcctgcctccatgacacctcttcccctacctgtgtttcagccagccagctggcagtgacagtggggcctggtgaacgtcggatcggcccaggggagcccttggaactgctgtgcaatgtgtcaggggcacttcccccagcaggccgtcatgctgcatactctgtaggttgggagatggcacctgcgggggcacctggggcccggccgcctggtagcccagctggacacagagggtgtgggcagcctgggccctggctatgagggccgacacattgccatggagaaggtggcatccagaacataccggctacggctagaggctgccaggcctggtgatgcgggcacctaccgctgcctcgccaaagcctatgttcgagggtctgggacccggcttcgtgaagcagccagtgcccgttcccggcctctccctgtacatgtgcgggaggaaggtgagagggggctgggccctggacggggttcgaggattgtcaaccccttttccttctgtttccatgacccctccctctccgtcagctgtttgcaggccacagcctcacgctcctcttctaccaagattgtgggaataccctgagtttcctggggcggtgcttggcggcagccctaaccccatgctccctggccctgcaccctctgaccccatgtcctttgttctgcaggtgtggtgctggaggctgtggcatggctagcaggaggcacagtgtaccgcggggagactgcctccctgctgtgcaacatctctgtgcggggtggccccccaggactgcggctggccgccagctggtgggtggagcgaccagaggacggagagctcagctctgtccctgcccagctggtgggtggcgtaggccaggatggtgtggcagagctgggagtccggcctggaggaggccctgtcagcgtagagctggtggggccccgaagccatcggctgagactacacagcttggggcccgaggatgaaggcgtgtaccactgtgcccccagcgcctgggtgcagcatgccgactacagctggtaccaggcgggcagtgcccgctcagggcctgttacagtctacccctacatgcatggtgagtgacaccccctccaccctcctcactctgccttcctcctggcctctgccactggccttcccttcccatcttctgaccctcctgctactatctctctcctccacattatgtcacatgaagtctcaaaaaatccaacttccagccctgcagtgcccacctgcacggggtcctctgtggttgatgctgacttgcatgctgagggggcaggctgtgggcagggatgggggtgtctgtgaatggagaaggtgggttcagagaacttgatggggaaagcgcagaggcaagtgtatgggtggaggatgatggcatcctctctgaacagtcatcctctctcccccagccctggacaccctatttgtgcctctgctggtgggtacaggggtggccctagtcactggtgccactgtccttggtaccatcacttgctgcttcatgaagaggcttcgaaaacggtgatcccttactccccaggtgagggaaaagaaccccccaaccttgttttcattgggcttcccacccccaagtcctgaaccaagctgctccctcccaggccccacctggaggaggagtaggcagctcagatccacagggccctgttaaggggtggaggccgcgagggagccccactcagggctctctgtccttagcccacaccgggcacccttttcaggtcttgcaggtgtcgactgtcttccggcccagctccaagccctcctctggttgcctggacaccctctccctctgtccactcttcctttaatttatttgacctcccactacccagaatgggagacgtgcctccccttccccactccttccctcccaagcccctccctctggccttctgttcttgatctcttagggatcctatagggaggccatttcctgtcctggaattagtttttctaaaatgtgaataaacttgttttataaaaagcaggcttggctgtgtcttccctaccatgagactgtaaaacgctcagggtgcatagtagggaggtggttggggattgacaacctattctggatgacccaggcctctcttcccaccacaaacaccatctggcctccatgggccatgccacccaccccaggaggggacacctgggttccatctgcagcctgaactgtcggggctgagacaactcctgattggactcctacttggggagggaagcatagaaaaggagggtaggttccagctgcctgtggtcacccccgcaccagcttctcccatgttaaagggcatgggcctccaggggcagtgccttttctgagcttcccagactttccccaactcttcccacgtctcattctcctggtcaggctagtcttggacctgactcctcccactaggccctggggctgaaattgttgttccttctgacccatagcagcagaatagaagcctcagaacacaactgatactcaggctgggacaacaggcagtcaggggagggcctgtgtgtccacagagccattgcacccacatgtactcgctgtacctgcatataccctctacccgcatatacccactacacctgcatatacccgcttcacctgcctgtacctaccctggggtctcctccctcccacccttcagcttcacccctcctccagtgccccaggagtttcatgaattttcttgcctaaggattctctgatcctaaaattcttacctgcacggcaccttaagaggcatctggcaggcctccttcagttgttatttaaacatttattgagcattacgagtttgctgtcatttttacagatgaggaaactgaggcccagatatgcgatttgcccagagtcatagagctaattagcaagtgtcaggagtaggacctaggtctcctgacttgttgcactgtacagtggtgccctgagtggtgacagtggcgaggagaggtgtggcagggtctcagtgacttcagcaggcaggaggggcctttccagactgagtttctctgcttgttcagctgcaatgggttggctcctgtgtgagtgcgtgtgtgtggataccaagtagcccacccgctcttgtccagacccccctgttttactgaaacccaaatgaatccccattctccatcccaacatctgttcttaggggaccagtcaatgccaggcttcaggaatctcatctttgatgacagggccccagtggccctgtgacctgaggcaaagatatccgtgttttgactgaaaggaagggactgggacttgggtcctctctgagtgaaccccagctgtctgggctgcttccatggccccctttcttgcttccagaggacccatagggccctggctatgcccataggaccctggctgtgccccataggaccctatctgcccagcctggaacagagaagactggagtgctttccccagggggcttatgaaagggcaggagtgggatgtggccagggccaagggaggaggtccttgctgggccagtgctgctgtgtgggagacaggcgctgtcccagggcaggctctcctgggcctatgcttttctccaggccagcttcaggtcccttccacccctctgcctctctcaacttgcagttgttctccctcactatccaggaagctgccgctggtgactgggatgtgatcaggaagcaggtggaggtggggtgagaatatgcgtctttgggaccccctggcccaattgggctgacagcaggctgcagacacatccagatgttctaactcctatcgcttctctccgattttctcccacattcaatcttgcctccagtcctacaaggggttctgtcctttgcccctaaaactcttcctgctccacctccccccgacctccccaggagccccctcaagtccttctgatggcttcatctctctgtcgggcctgctcagcttccagacaccccctccacttgtcactgccctgtttccattgatggttgagtttctgggcccaaagttaaactcttcagcctgggcttcgggtccctttcccacacataaaaccccacccttcacatttctctgtctgctcctgtgaggatcctcagcttcttctcagcttctcttcatcttcctctcagctactcctcagtttctatgccccatgtcctgaaacgacttccaagtattcacttagagcacaggttctcaaagtgtggtcctcagtccagcaacagcagcatgacctggggacttcttaggaatgcatggttttggtccccacctcttgggtcagaaacccttggagtggagcccaaaaatctgtgttttaccaagccctccaggtgattccaacgcacactggagatttctaactcctgacttacatattccctatgccttacactggccccagccttctgatcacccacactcccctaccctccacgggactgcacaggttgtcagtttgaattatccctcgttcagtcaccacaggtagattcctctgttttcccaggtgccccttattttgaggacaggaaccaggtttttgaatgtccactccacatggcacccaatcagtgatgtgaatgactgtgccccaaggacacactgctttcctaggggctccctgtttcccagctctagtgaacccactttctagatctctctcctggcccttcctccccagaacctctctctctctcttcctgcctgtgcctgatacctgtaagatctcactccactgtaagaaaatagctatccctggttttcctttcccaggcccctctccaggccccagctcaggcacctccccgctctgcctgcttccctgaacttgcggactaaggtcattcacaccttgctgagccccttgcacgccttcatcctggtgagggtggagctaggagggcaccctcctcatgtgcccatcttggtccggctcctttctccttcacttcagcttggcctaccgtgtcattagacagttgtgccatatgtggggaggctggcagaagaggtgactggggactgcaatccatcctatactctgctccccaagccatgcaccctggtttggggctgtatctgtctggaggaaaagggttcctttttaaaatttgcacaggggtgttctacaggttagtggcagccctgagtggaccagttgtctactggtccatctatgtatctgtcagctgtctttatctgctaccatcttcccatccaacccccaaaagtccatcattctgtccatccatccactcatgaacaaatgtgaaggtcaaacacagactggcattttcacccggccccaccctccatttccctgaaatcaggacccctcccttccatactggtttctagacttgaggttctgggggacggggactttccaactttagcacatttccaggggctttgccttcctcctcctcctcctcctccaccacctccgatatgcagttccccatgtatctgtgtctggcccccggtctgccacaggggtctggaggaagctggtcacaccttggactcactctctgggggtggcaggcagccattctgctccttgtcagccccagcttccccacccgccccctcccccgccccctcctcctccaccttctcatccagccggctggggatggaccagtagagatgggcatcaaggcgggcggcagcctctgccagctctcgagcactgcacgaaggtgtgggcacctcaaaagtctcgtgaaagctggcatagtccacttcgtagaagccgtcctccagagtcagcactgacgtgaagcggtggccccacagcacctcgtctaccaggtaggagctccgagcttggcatgtcattcctgggaggaggggcaccggtcagggggaatctcagctccaggcttccctctcctcttctcattccacaaccctactcccagcaccctcccttctattccttcctaagggctcccacctccctttggtccagtccatttccccccctccctagctcctgttcttacccagctccctcgtgtcttctccatttgccccaactcctcttaatgtccagctcttttttcccctcctgtcatttggtgatgccaaccaaaaaaagcttaaccttgaaactaaccttagggatcctctagtccaacttctcactccatacagggctccccaaaggagcatttctaacaatgggcatctagcttatacttgattacctcccaggattgatagctcaccacttcataaagggcccactcctttgtatgatagctctaatagttgggttgttctttatacagagctaaaacctgtaccctgggatttccaactcttggcttcattcccctcccacttcacagtcctctgagtatctgaaaacaggagtctcagattccctcatgttttctctcttgacttaacatccctggcttcctccacgattcctcatttgacctggttttccagaactctacttttttgattacaagccagaatggccaaggagggccctttaagcattttgagtatagtaaattttccaactgtggcctgctccgtgcataagagagcgcgcaccatctctctcttctggccatgatgctttcactaatagggcccaggataacattacataatcattttggaggctgcatcacattgctacgacatcaagactgtagccaactaaaactcccagttcttttttcaccagtgctcttccatgctgtgcttacataagtgatttttttaaagcctaaatgtagaattttatatttattcattttaaatgtcatcttgctgggttttggctcattattcttgcttttcaaaagcgttttgaatcctgactgtctcacccaaaatattaccatcctttccagctttatctctctagaaaaacagacagattcctatcctcatctcctctgtcctggtcctccctgcccggggcttgtgtcctatcttcctgttgggctggtgcacccctcagggcaggtcattctcctttctgccacagggtcttgcccccaacccatatccatctcggaacaaggggaaacagaagagtgaacattagctaaccggagagtggctgtcaactcggaaagcctggcgctgagacattggtattcctcggtgaagttggaatagaaagtatccagtgggagagaagagaaagaggcataagggacactggggagagaagggcttcgaggaggagagggcagggctgggggtacaaagagaaaagagggccgggcagcaacttccctggagggtgaggggcctgcctgagatactggcagaaaaggagtgacagctggagagagaggaaagggaacggggtgagtgggggaagaggaaagagtcggggtgaagcaggaatgggaacagtgatgcggagctggggttggggtgtgaagcggagtctcagcctaaaggggccagggaaaggatctgaaggcaccagcttgtcagcgaagccggcagggagcatcagcagctctggcgtcagaggagggactgcggcgccccctagtgggcctttggtcctccacccgcagtttcctcatcctcatctatcctctagatctcaagtcctaagtgacctcctttgcgactcctgtaacactggtcttttttcacctgctcccaaagccttcactgtgtaggtctgggttggacttattgacatcacagatgagttgccagttccttttggaaaagagctagaaaaggtaacatcatctatatcccttgtcagtggaaatggatgaattgggaaaccgaggtacaagtgagactaggtattaaactcccctcaagatccggcctagaaataactcaggcaatggaaaaccttcaccgtcaaattccaggggcctgaacctgactgcagtgagaaaacccctgaacctaacccctccttccaactcgggaccactaaacattgaagccacattgcctgtgtccaatccaggcatggccacttattggcttaggaaagtggacaacttccttaatttctcattggagcaatctcatctctaaaaagtgagcacaataacaagaagttaccttcagagggttcttgttaggattaaatcgactcagaggtagaaagtgctttggaactgcgcatgacacagggtgaatactgggcgagcactagctattattactgtccctattccaagtgacacattcctctgggcccagggccccacgccagtgccatttcggagaattcctccaagctttctcttggccttctgcggcgttgctcggttccactcccgcctccgacccctgtctcacctcactgtctcatcctccaccagcccctccatccatcctccccagctcccctggcccctagtctcgcccctgccttcctcggtcccgcccaccctctgccaaccccgctcccctccccaggcctgctcgcacccgtggcttccaccatgccctcgaggataacgacgatctcgaagtcgtccctctcgagggcacggcgcgacgcctcccagaaggggctggcggcgtcgatctcgtggctgataaccagcggcgagacgaggaagaggcggtcgtctcccgtgtcgaagcccacgctgaggtcggtctggtgcagcgggatgaactcgccctccagcgtctggcgcgagcggatgagcttggcgcggatggaggcctccactatgtgtgaggagcgcaagtcgcccacgcggaacatgaggcagaggcgcccgtcgcgcagcgacaccacggcgtgcgaggagaagacgagcgtggctgcgcgcttgttgggctgcgagatcttgacgaacatgcagcccaccatgaaggcgttcaccatggagcccaggatggcctgcagcagcagcagcacgatgccctcggggcactggtcggtgatgacgcggtgcccgtagccgatggtggtctcggtctcgatggagaagaggaaggcggccacgaagccgttgaggttgttgacgcacggcgtccacgcggtgtcctccaggtgctccaggtcgccgcggccgtaggcgatcagccaccagatggcgccgaagaagagccaggtgagcgcgtaggccaggacgaagaacaacaggctgaggcgccactgcaggtccaccagcgtggtgaacaggtccgtcaggtagcggtatgtctcgcgcacgttgccctgctgcacgttgcaccggccatccttctccacgtagcgctggcggccgcggcgccgcggcggctcctcctgcccgggcgagaaggccgcgttctcctgcgccatggcggccgcgtcagggcgagcgctgcgggcgcctggagtgcggcgggggcccgagctgctgccacctgccgcgcgtcgctgggcgcctaggcggcgtcgggggtcctggaggggcttaataaaggtttgccgaatgagtggcccctcgggagatggggaggcacggggcatcagggccagcaccgagccctggggggccctgggcgagtcccttcgtgttgcctggcctctatttctgggaataacacattcagccctaactgccccccaggctcagaaagttgtgagggtcaaatggaatgatgtacctgaactggatagaactgtgcaagttccacgatgattttcaggggaaggaggtaccagatattttggtgccatcacctccagctggggtgtgcagcacctcaggggcagccccggggccaaagacccaggcccagatccccctagtgatttcctgaaatcaatagactgggggctttttggggaggggggcaggcgggtaatggagccctccctgccctaaggacttccaccatcccttccccagctgtagccagtgcagccaccaatggctctcctcgcaggctgttttgaagttcaccccaagactgatacacagtctttctcattcttccctccttggacctcactcactccgctccattccctcccctcaacatgcttacaaacgagaaagaaatgaaagctgtggaaagtcagtggaaaccctccagtgcacaagggtggaacattaggaaattcccactagaaatcctccctgagacctacccacgatcactgctgctcttgggccagcctcatttcccttgggttttttctcctagtggagacagcctgcaaatggggaggggaactggaagatcccaacacagaagcctgggaaaggaagcccagagttataaagagttaggctcgtatccctctgggatcctattcttcatgagagacatggaatcagatcaggtgaagcactaagcacccacatttatttccccactccctctagttatattttcccccagcctcttacttcccatggactatcctaacaccagccccgcccccacctgccatatgccccaaagcccacattccaagcgaagcccacctgatttttcttcacatgcttgcctctgaggagctctctgagctgcaatctgctctgagagaggtccagagcccttccccaaagcacccagggtcctctaggagatatggaccatacagggaaaggtttagaataggatttgggactcttccaccttcccttctctttcctgggaatgatcctctcctcccactccacggaaacgtgggctggctagtgggtgggggatggaggagtgtgccataggaaccacagatggcctggatggttgaccaggtcctggggagaaactgcctgggtatgtgactctaaacctagcactccagcatcttatgttctggggtgaggtcctctgcagtcagcactctggagagggtgtgtgtgtgtgtgtttgtgtgtcttggggtagagaaggtaggaagagaaatcaaaatgaaatggctttgagcttaggggcaccccctgcatttattgtccatggagtcaggggacacagggtccaagagccccatggcaatggaagattagggtttcccctgcccccaacaatgggcttccttttcctttcctgaagctcagatgtcctcaggaagagtaagcattgactggctcagagaccccaggtcatgcagaaaacgaccctgctcccattatcctagctttagtcccaggtgggcttccagatgttctctcagggtcttaggtaatctgacccccagtcggcttgcctagacagatctctctgcccagggatggggaaggaaccccgatgtcggatcacccccagaactctctcactctccattgccccagggatctaggtaaaccttattttgaatgtgtcccacatcctgtcttcctgagtgggggactgcacttttctcaggggaaggaaaagtgtgaaattgttacctctatctcaagatcaaggacttgatttctccatcttccctccaagaatttcagttcctccaacctactcctcatttcttgtgcatgctatgacccctttgcagaagattgcaataccacttttcctgggcccctcttcctccctctagagagctggggagtaagggggctcattttttggaaggagagacctggtgaaaactcccccaagaaccagctcctcccaaacccccacttgccttggaaataggggcccaaaccccaagtcccccgcaactcaactcacagcacgtggagaggagagtagccggcagcagagacccctggggggtggcgtccatgcccctgacaccgccccccccacgggccccccgaagggtgggagccgcagacaccgctgtttctcctaaatgtagcggcagctctgactaggacttgctatctgtgtcatccctacttcccaggctcccctgctcctctcttgtttccacggcaaccagtctggcgacagctccagagcatccccctcccctccccagtcctgggtaccactaggggttgatccaaaccacacgccatagctatttttagccaaagtccctcctcctggacaactcagagcttggctcctcaccccctcata

SEQ ID NO: 815 - DNA, 2808 bp, Homo sapiens
gctcatccagttccttctccttctgtttcttcttgccgcccccattctctgccgtggtggcggcagggttcctcaatgtggcttctactggcaaccccgtgagcatcttctcagagtcaggcactgtgccacgcttgaggaataccatgtcaaggaaggtctggtctggcctgtgccacttaccctctctgggcctcagtttcctcttctgtaaagggggggggtgaaaaacaggtctccagtgaccttctggatcctggaagcgcccttcagctcaaacccttcgcattcaggaactcctggcttccgccaacccctacttcagcagggtttgcagcgaggactatggctcagagcaaataactgaattctaaatgcgtggtcacagtcacctcgccaatcccagggaccctgcacccaactctccaggaaaggctggcagaacccgcgccatcccccggagcctccccagagctggccgcgcaggatgggcgccctcaggcccacgctgctgccgccttcgctgccgctgctgctgctgctaatgctaggaatgggatgctgggcccgggaggtgctggtccccgaggggcccttgtaccgcgtggctggcacagctgtctccatctcctgcaatgtgaccggctatgagggccctgcccagcagaacttcgagtggttcctgtataggcccgaggccccagatactgcactgggcattgtcagtaccaaggatacccagttctcctatgctgtcttcaagtcccgagtggtggcgggtgaggtgcaggtgcagcgcctacaaggtgatgccgtggtgctcaagattgcccgcctgcaggcccaggatgccggcatttatgagtgccacaccccctccactgatacccgctacctgggcagctacagcggcaaggtggagctgagagttcttccagatgtcctccaggtgtctgctgcccccccagggccccgaggccgccaggccccaacctcacccccacgcatgacggtgcatgaggggcaggagctggcactgggctgcctggcgaggacaagcacacagaagcacacacacctggcagtgtcctttgggcgatctgtgcccgaggcaccagttgggcggtcaactctgcaggaagtggtgggaatccggtcagacttggccgtggaggctggagctccctatgctgagcgattggctgcaggggagcttcgtctgggcaaggaagggaccgatcggtaccgcatggtagtagggggtgcccaggcaggggacgcaggcacctaccactgcactgccgctgagtggattcaggatcctgatggcagctgggcccagattgcagagaaaagggccgtcctggcccacgtggatgtgcagacgctgtccagccagctggcagtgacagtggggcctggtgaacgtcggatcggcccaggggagcccttggaactgctgtgcaatgtgtcaggggcacttcccccagcaggccgtcatgctgcatactctgttgggagatggcacctgcgggggcacctggggcccggccgcctggtagcccagctggacacagagggtgtgggcagcctgggccctggctatgagggccgacacattgccatggagaaggtggcatccagaacataccggctacggctagaggctgccaggcctggtgatgcgggcacctaccgctgcctcgccaaagcctatgttcgagggtctgggacccggcttcgtgaagcagccagtgcccgttcccggcctctccctgtacatgtgcgggaggaaggtgtggtgctggaggctgtggcatggctagcaggaggcacagtgtaccgcggggagactgcctccctgctgtgcaacatctctgtgcggggtggccccccaggactgcggctggccgccagctggtgggtggagcgaccagaggacggagagctcagctctgtccctgcccagctggtgggtggcgtaggccaggatggtgtggcagagctgggagtccggcctggaggaggccctgtcagcgtagagctggtggggccccgaagccatcggctgagactacacagcttggggcccgaggatgaaggcgtgtaccactgtgcccccagcgcctgggtgcagcatgccgactacagctggtaccaggcgggcagtgcccgctcagggcctgttacagtctacccctacatgcatgccctggacaccctatttgtgcctctgctggtgggtacaggggtggccctagtcactggtgccactgtccttggtaccatcacttgctgcttcatgaagaggcttcgaaaacggtgatcccttactccccaggtgagggaaaagaaccccccaaccttgttttcattgggcttcccacccccaagtcctgaaccaagctgctccctcccaggccccacctggaggaggagtaggcagctcagatccacagggccctgttaaggggtggaggccgcgagggagccccactcagggctctctgtccttagcccacaccgggcacccttttcaggtcttgcaggtgtcgactgtcttccggcccagctccaagccctcctctggttgcctggacaccctctccctctgtccactcttcctttaatttatttgacctcccactacccagaatgggagacgtgcctccccttccccactccttccctcccaagcccctccctctggccttctgttcttgatctcttagggatcctatagggaggccatttcctgtcctggaattagtttttctaaaatgtgaataaacttgttttataaaaagc

SEQ ID NO: 816 - protein, 606 aa, Homo sapiens
MGALRPTLLPPSLPLLLLLMLGMGCWAREVLVPEGPLYRVAGTAVSISCNVTGYEGPAQQNFEWFLYRPEAPDTALGIVSTKDTQFSYAVFKSRVVAGEVQVQRLQGDAVVLKIARLQAQDAGIYECHTPSTDTRYLGSYSGKVELRVLPDVLQVSAAPPGPRGRQAPTSPPRMTVHEGQELALGCLARTSTQKHTHLAVSFGRSVPEAPVGRSTLQEVVGIRSDLAVEAGAPYAERLAAGELRLGKEGTDRYRMVVGGAQAGDAGTYHCTAAEWIQDPDGSWAQIAEKRAVLAHVDVQTLSSQLAVTVGPGERRIGPGEPLELLCNVSGALPPAGRHAAYSVGRWHLRGHLGPGRLVAQLDTEGVGSLGPGYEGRHIAMEKVASRYLRLEAARPGDAGYCLAKAYVRGSGTRLREAASARSRPLPVHVREEGVVLEAVAWLAGGTVYRGETASLLCNISVRGGPPGLRLAASWWVERPEDGELSSVPAQLVGGVGQDGVAELGVRPGGGPVSVELVGPRSHRLRLHSLGPEDEGVYHCAPSAWVQHADYSWYQAGSARSGPVTVYPYMHALDTLFVPLLVGTGVVTGATVLGTITCCFMKRLRKR

SEQ ID NO: 817 - DNA, 93329 bp, Mus musculus
  misc_feature (1)...(93329): n = A,T,C or G
acagctgatacacaagaagcagatgctgagtcatcaactttcaaaattgtcttcctgttcattccacagtcaccttctctgttcccctagttcaccatcatcctcgcactgcccagaaatcccaagcaatccttatgacttctcagctcaacatgaccaaccaactgccttggcaaggggtgccacatgctccctcttcttagaaaacaatgtactctgttgtgtgaacctcatcggttagcagcaaatacaaacagagagatcttccttctttgagtttaaatattctcataaattctgtatttctctatttctttttctagtatttttttttgttttttgttttttttttttttcgagacagggtttctctatgtagccctggctgtcctggaactcactttgtagaccaggctggcctcagaaatccgcctgcctctgcctcccgagtgctgggattaaaggtgtgcgccaccaccgcccagctttttctagtatatcttacaagtttatttaaacaagtgtaatcagtaggaactcaaaacaaacaaacaaacaaacgccctgaggtcataatttctgaatctggattgaatttggaattcttttcctctcaaaattaacattatgagtttactgttagtgtgttttccactttccagatcctatttgcaagtttgatgtctggtttaacaagtgatcaaaaagaaatggacaatttttaactcattttctttcttaactgtattcaactaccttcccaaatcacatgtgtttacacacacacacacacacacacacacacacacacacacacacacagagagagagagagagagagagagagagagagtcctgatgatgaacaatatgaagtccttccctgcattccccttaggttgtatcattgtttagaagttctttggttctcatccagaatcagacatgaacagagagggaaatttcacttagccttataaagtagtaagcttcaggcttgacttgtgtgtgtgcacatgcatgtgtctattcctgtatgtacacaggtacatgtgtatgctggagttcatgtaaagatcagaagtcaaacttgggtgttattccttagaaagcatctaccttgttttcttgaactagggtttcatccggggacctggggcttcttgagtagaccaggctgactagcccccggaaactgcctgtctccacatccccagtccttagctttagtgtgggccactgagacaagctttttccatgcatgctgtggatcaaattctgagtctcatggatgcacagtaagcatgtcattcactgagtcatctcctaaattccttgaatgtttctttaaagctgatctggcacatctttttaatgaatcaatagtttgattgtaacgagcatttattgagtgcttattcaaaagccaatactatagtgtctggaatgacagactcttcatttcattctttgaggcaaactgttattgttacatacttaggagcagatactcagaagcatacaggtgacttacctggagtgagaattgtgtgtgtgtgtgtgtgtgtgtgtgtgtggtgtgttaatagaattctatatgcaagaactgaaaggttctattcaagttggtacttcttgaaaagtgcaactttccttccttccttccttccttccttcttttttcctgtcgtagggatgagacctagtgtcccataagcaagcgctgtacttctgagcctatgttctcagccctctggcttcagactttcatctagtaaacatttaaggagtattttgcaaatatttaaccaaatctctcactgacaacttgcagcttaaaacacctttaaaacggaattcagtcactaaatatcaaggggaggactaggaagcctggtggtactatcagttattggttgtaggttcctactggatattgatagtgaacttaaaaaaaattatcttcagttgaaaacatcatgtaaatcataagggaaaaatccccctactcagatctcttaaaaggtatgtggaatataaatctaagttataaagggtagttcaattactgaaacatttctattttctataaaagaagctgatatcattggcatttatctgtacctgttcccattctaatacagttactatttaatctaattaacaaccttgtaagataattttatccataatttatacataaagtttaataatttgttcaaggtcacacagctaagtcctagaatttgaactcgtagtccagaagcttcatggttaaccactcttcaggttgccagacaaaacgcccagttacagctgagtttcggattctaaggaaatcttaaatagtgcatgaaacctatttgtactaaagtgttttcatttcttagaaatggaaatttgcccaggcatcttacgtttttcattgttaatctagcaaccttaccacagtcttctgcctacagcaagtccctgtgattgggactatttgcagtttacatgtgcttgaattttgctgcagcataaataatgctaggtgcctctgcgaaactaggcaaacccttttggattccctttccctccctttatgggggggatgggttggcctggtaactgtctgttccctgatagtgcaagcttgtcgttcctgataagcaaggcttagcttcctcctggcacagtctgtcccctccctacactggactatctctgcagaggccagctgtatcctgcctgctgctgctcatcactgtctagcctgcttgttgcaagagtccttgactccttttaggagctcgctcatgtacatagatgctccgaccaggtaaccaggttcactggaggaaagacaaacgaccagataggctgaagctcagcggaaacagatcgagcatgtaaaaatccatggtagaaaacatatcaatagggccggatcgagtggggcccgagtgagcagagatcctgagttcaattcccagcaaccacatgatagctcacaaccatgtgtacagctacagtgtacccatatacataaaatacataaataaatctttattttaaaaaaacatatcaataggcaaaatacatgccaccaaataagcaatatttatttttcggttctggggattgaacacaagttttgtacaaccactgaactatattccagtccaacaaacgactctgacttgtctgtgtgtacctgtcattcagcacacactgtgtacctgcctgcctggctttttataccacctggacaatgcagctggagaaacagaaactgtgtttttatgctgtattgttttgagccagagtttcatgcagtacagactaagtgcagactcataagtagctgaggatgatttagaactgcctctgtctcatgtctgaccttcagtcctgagattaaagatgtgagtcaccacacacagctcttaatagccacctagaagccaaatgtattgcccttcgatatcatacacaatctatttaaaacaaacaagcacagaggactgtggaagtaactgatctttattatctttgactagtgtagataaaaagtctgtatatctcaatgtacaccctttgggtctggttagttttcctgtgtgattattttatttgcaagttttgttgttgttgttgttcttaacaataaagcttatgtgaattgtagtgtggataactgagaagagtgtctatacacactcctggatagttatagaattaccttgattgaacggattttaaaatcttttttttttccaaatagcctgaatttctatgacatccaagtgaaatagcaatggtcatgtatattatgacataaaaatggcattttgtcattgtaggtcattttctatgatcagcacttgatatatttctctcagtatttttaagtcgaatgtgatggcacacaccttcaatcccagcactcaggtgtctgaggccaacctgacctatatagcaagcttgtagggcagccaggactgcatgatagagagacactgtctcaaaaaaaattacgtatttctcttagttatttttaatcaaaagagtgccttgtatatctcaggttttactaaggccctatgaaattttgtatttttgttgtacatattataggtaagaacgctgaggtttcatgaggttaagcaatttgcccaaggccacacagctggtaactgacagacccccgcactgcactgaaagccacgtcgactcattctaggagccgcacacttaattactgctcaacagcgcttctctaacatgaggtcggtagatacggcgtctgcggtgaagaagcagtttttaaaaatccaatctgctgctgacttttacttcaaaggcatgaaacaatctccagggggaggagcaggtgggtggtaaatggcctgggtaggattaaattagatgctgtgactagcacacagcacacaccacttgtgactcaccacatgagttggacaacacctgaactgatttgtgcccaggttcaaccacagaagcccacagatcacttgcttgacttgacattgtcacagctgggaaagattctaaatgattacacgttcttttgcacaacaatgactcaaagttcactagtaataaacagtttgcagatgagtggcaatctatggagcaccctttaagtaaactagtatggataagattattattgtaccacacagcagaaagaggatcatgactagtaaattagctgccttatagtctcctccttttttccacatataaatatatgaccttgaattttaaagattatattattttattctctatgtatgagtgtgtttgtctgcatgtgtgaatgcataccacgggaatccctggtactcatgagaacagaggagggtgtccgatcccttggagctggaattacagaaggttgggaactgccaatgggtactgagattcaaacccagttcctctgccagagcaacgagtgctgtaactgagaaggcaccccccccctcactctttgaatacttgttgaaaatagagatgaacaaaatagatgaagttgctgcctttcggaacttagatttttagtctacccaggttttgatggcttacgttttaggccttgttaaaaactgagtattttgtcaatgcattcaatccctctaaacaaaatttcccctctgcaaaatgaacctactacaatctatttaatattgttactgataggattaaattaatgatagcctaccaacgccaggtcataatgttttagcacggggaccatatctttgtattcttagcaacaagtgtaagtccctagcgagcagcatgccccagtctaggtttgatgagtgaatgtgtatgaggtcctatgtgtgtaagtaatatacataaagaatttacattttgcatataaaatatcaacctgaggctgggggtaggtcaatggtatagtacttccctactacacgcctagccattagtttgatcaagtccagatgttaatttacttagtaaagtaacattcctacttttcaatttcttaaactctaacatggcaccagaaaaagttcatgagatactgctgaacagatgcaacgctactcttgggttatgtgtttctgagggttgaagctataaaaatacatcctgtaaacactcaaaagatgaaatgttctttctattgatctgtagcacagtctcaatgattcttaaagaccttttccgtaaattggtcctggacctagctttgcggtcctgccaggtctcagcctgatcacgcactctaggattccaaactgtaactgcactgtgaaagtatgctaagtttgcgaagcgtttagaagatcttttccaccagcaataacatgaaaagaaataatttcatactgccaaatttgtttaggctttaaagacattctctctgagagcagtggggtttctgttagtgctagacccggatgtcctcatttagatttcaggaaagtgtcactcactctatggctctttgaggagtccctcattcgacaaggtgtaaggctcacaccgcagtgagtgctacttcactgaaaggtgtggttcttagtagcaaggaaaaaaaggaagaaaatgaaaaagtaaaatatatcccgaggcagttacataggccataggtgagatacaaacagaaaatgtgggacttctaaaggaaagaaaagtgctctgggtatgagctgcagtatgagacagacttggagctgggataaagcataaaaggcccctgtcaccagcagaggggtagttgaagaattaggacagttcacaacacaagtactaggaaggtgggggcagggagagctggagctatgtcactggccaagtattagactgagcagttcatgcttaatttggtgttgaactaatgaaagttctaaaatgggatggggtgggggctcaggatttaactgttgcttaggagggtatttctgcaagaacacaagacacctggaaaggaaagcaattgagcaggagaccaagaagagagttcgtatagcaagagtctagactagagatgatcaataaaccaatcaagggtgagggtgacggagctagagagagctggcagatgggagagctacacgataggaagtatctattcctgagctgagcaatatagaagcctctagccatatgcagctatctaaatataaatctaattaaatttaaatcagatttaaaatacagcccctcagtacatggtcacattttaagtatttaatagccacctgtggattatgcagatagagaacaatgaagttcttggggagtgaagacccaagccttgggagtaatcctggatttgggatggtgaggcaggtggtctgtcctaagtttggggctagcctgaactacacaatgactaccaagcctgccagagttgtaaaacaagaccttgtctcaaaacaaaaaacaaaaacaaacaaacaaacaaacaaacaccaaaacagccaacaataaatgaaaataggcagaagggttatgttcatcccagttagaatgttctattggacagtgcacattgctttgagggcgactggcatagagatagggacaagggattaaaggacaccaaggcttggcaggtttgtgactgagaaaggtgatgccatgtgaagcagatgggaagacaggaggacctaacagatacttcacatctgtcaaactctagggacacaagtgccttcaggaatgatcacgagctcatagtgtaaggaaggtcaagtgtccaatttgaggtctcccaaagctttgcacaggggccccagtggtatctaactggcttattccttcctacgttctctttcttcccagaccgtggtgctccagatggttgtgagtgccaggtctgttcgtcggccctagaggatccgtagcatacacacactgtgacaaagctggagtcccaagggctgtgtgctctttatggagctccgatgtgccagtctgaaccctcgtatcttcacagatgctgcgtacttcctctcccctgattgcctcacttgcatctgctggatccttggaaagtcccctcgccctcactcacttgatagcttcctctgaaaatattccttcccacgggtgccgctgctttttagttggcctcttctctttcacaagtcaagttccggagtgtctcatccactcccttacatacctctcactcctctcgcattgactttcagcagcaaaactccaagcagtggagggcaccttgctgagtgatttcagtgtagatatatgaccaccccaccccgttaagagaggataaaaggaagcacacaggccagatttgatcttatccgtcagtccgcaggcaacacctacagcactgtgtaaactggaaaaaataaacacaaggaacaggcagggcatggatgcatggatgcgtggtgcgtggggcatggaaaactgacaaaagacaccactcctaagggagaacagctaggaaagtgctctttcctcaaggctgaaattgtcctaccaggtactcagcctggtgggcaaaataaagactagactttagctctcacttgtcccctttgctttgcagtgggctgtgcccacctcagaatcacacttacttgctctgtgtctgtgtctttgctacagaacagtctgtgactctcctgtccttgttcacatttaaggccaactgcttcagcaccgtgctaggacttgttgcttcttggttcccatggtttctctaggtgtctcctcttgtctctgcaccggaactttatttttcactcttaacaccacaaggaagtaactcagctttaaaatcctgtccctggatccccacaccattcccactactgactgttgctaggctcagccagctcctggctgtcttcctcgcctctctttcattctctcaacacaccccaatcagacatttctccatgtgataacactggaagggttttcattaagcttctcaacaaacttcaggccaaacttggtcagtggttaaattcccaactcttgactgaggatgaggctcagtggcagtttgtctagcatgaaccaatcagggtggcggggatggggactgtggggtgggggtgaggcagagattgagattcaattgtcttcttagctatttcagcagtaggcaagggaactgactgatcactccctcttttctaaaacaactccctaacaacttccttccttccaaggggttcctctaacctgactgtcaactctgcttatctttaacctctaagtttctcttggtcctctcttccagttactccccatccctaagagagtttatgtagaccggagggtcaaatcatctacatcctgatggatctcaaatttatatctcagactcatcaccactgaactttctccatcccccataaaactgaactctcaatttctttggtcccagctttgttcttaccctatcttctctcttattaaatgatatcagtcagcaggcccccaacctaagattcattcctaattgtttcgttcgaccctctgctttctcaagtctaaatctattaaaataggtttaataaagctaaaataaacaaaatctaaaataaaataaccactcttggccaattggacgagaatagccaccttagacttcccctgtgaacattcgtgcttcagttggatattttacatacacagtgagactcactccagttcccgatgggcctgaaactcattgtgtagtccaggctaacctcaaactcgtggcaattctgttcctgttttcaaaatgctgggattccaggagtaaaccaccacgccctgcataaagttaacctttaaaaacatgaactagatatagttgtttctgggcccaccctctcctcggggcttcctgttgtcattacaatggcccaaaggctccaccgggtctggtcgtttgtccagatcttggcgcctcagtactctttggccatagactctacttatctatccatcctttcgcttgcattttgctagttgtgaaatatggaagacacaccccacctcggggtttgtggctgatttcctctcaacccaggaaggtattcttctcatccagcctcttttggataggctcgtttcttcatagcacgaacaaaagcatgcaaagccctccctggtgacctgtgaattttgctactctttttgttgttcgtgttccctctcctgggtcacgaggatgagagctctataagtgactttccctatgtatgcctaggcattggggacctactaggcactcaactaacagctgtcccatggttgcatcccttcaaaattctctttctgatttttttttcccttcctcatttcaatgttggccttaaccaccttctcaaaggcaaggccccagttcctgttggcacactatgccccccaccctttgaagaacggctcccttaaatagattccggacacagcggggaaggcggagcccagggcggggggggcggggcctgcgtgctgcgtgcgtgcgcgttccggaggcgccgccgccgccgctcccgaggccgctgctcctgccgccgccgtgcagagcccgagcccgagccgcggccgagaggagggaggaggaggaggtggaggaggcgccgggccgcggggtgagtacggggtgcgagtgaggggcgcggactggccgcannnnnnnnnnnnnnnnnnnnnnnnnnnnnnnnnnnnnnnnnnnnnnnnnnnnnnnnnnnnnnnnnnnnnnnnnnnnnnnnnnnnnnnnnnnnnnnnnnnnnnnnnnnnnnnnnnnnnnnnnnnnnnnnnnnnnnnnnnngaggggccgcggctgaaggccggagccagccacgcccgcggaccgaggcggcccggcggggcctgcgggaccggccgcgaggggcgggccgcgagatgggacgcgtgtccgcgcccgctcggctgtcgtccccgcggacggagaggtgcggtgccctccgcgcggcctttgccccggccgccgagcgctgacacctctgtgtcccactccgccgccagcccgggttcccgccctccctgccctctgtattctgccgcttgccatgtgttcgcctttgcagcgtcgctctcgactctctgatatctgctgctacccctgaattttgtcaggaaagaggccacggtgtgattccggtcttccgcccaccgagggcgtgtgaggagtgtggggtggtgggattgtagcttgtctccttactcagaaagttaagggcagtgtcttctgctgagttgtgtaattggctgttgtaaggagaagagcaaggaaggacagttgtgtcccccgcgtccgccccccctcctatctgagatttcctcacaggatagaaaactagagttgaggggacctttcatgccttggaaaaagagctaccgctcagaaactgtgagtgtattgccgttgggaaaggaaaatcgttttgtcgctgctttgaaggaagtactgtgtaagaaatggaataaaagggcaggaggttaatgggccaagcgggacaggtaccaaccgctgttgtctgcttcttgggtggctgaagatactgtttttattagagtcaaagtgtcgactctcagaattaaccaggggagttagccttcagaagcgggcggttagaagagatgatgctggaaacaggatttggaaactttctttgagtttcctgtcagagtgtgtgggggtagatatgcctgtgagtacttttttcttttgatgtaattgatttctgtaacactttggtagagtaagtactagattaggtcccagactctttcctgtctttatgctcttctgtaacactttgtttcaaaattaaatttacattttcggatattctttcttagtgtgactcttgtttagtttagttccttgctacttcaggttctgttatgattgtgttcgttagcaaggattatacctgtcccagcatttgtcgaatgagttgagtggtctgtttacacatctcttatctttttgagagaaatctttatgttaaatgttgcattccgcttccattataaaaaatgtcattcttaaccatttctagaacatggtgatgcatatgaactcttcctttgcccaggaaaaacaaaacagacatttatccccagaatgttgtattcagcttctggtctcctctaaagccacccatagacaccgatcttaaaagtgaacagagatctcgatgttattcagtttcatattaaaactttgcaaaagtgcacactttttgtggcctcaggtgtgatcgtgctttcaccctaaattctgaggattttggaacaaggtttaaaattgatttcagttttatgaggaaaagttctcaggaacctctctcccctccccccaatctcctgtggctcagtggtgtcactgaggaagaccttgaaccaccaactctcttgcctcgacctccagagtgcttggatcagtatagacttccctggtttatgtggtgttgggatgaaacccagcttcatgcagggaacttttagcagtcattttgtttgtagtgttgaggagctaatccagagcctcaagcagggttggcaagcactttgcccctgagctatatccccggctctaaccagtagccatttttaaccaatactccctagtatattttgacccctctaaactcataatcatgactaatcagacttttgtataatctatgttttagtaatatgagcatttgaaaatcaaataatttcttttttttcctcttccaagcttgttcatatgtgtggtcttcatgtagtcagttgtgaaaatatgcaacattcaggaagtacttaattgaatgtctgctgtgtggataaggagttcttgctgtcatcccttcagcaggagggacaagaccctagccaagtaaatgtagtgtcaggtgttagagctgtgtggaagggtgaggactggtgaggggctagagaatactgtcagggaagacctgaaggaagtgaggagggctgtgtgcttcctcagatgcaaaaagatgacaggaagagcgagcggcctgctagggcaaagaccctccagtatatgtgaccctttgagaacagctaggagggcagtgtggtgtaagaacagtaagcagggagagaagagggcttgagattagagaagtaaggggggctcttacactcagtactgggacgtttgcattttacactgactgacatgggggagcccttagagtagaagagagaccttatctgacctaagtttatgaacatccttctgactattgtgtggaagtcaactcaggttggggaaggaaggaaagagtaggatctaggatttttttttttcctttccttttttaatgttctggggattgaacccaagtccttgaacttgctaggcaaatgcctagtaaccaagttacatcctgccctatgtcttcctttttaacctttcaaccatgctaagattgtccatcttctttctgtcgggcatgtaggtatcctctcctccccatagaataacaatgatggttcacagtagtctaggcaacattttttttttccttttggaatatttctttgtgatttatttctaaaaggatcagtatgtgaatagacatatagttagttggccatctagttttaacagccgtgttttctgagcacaagtttcatggcaatttagttttcattgggtgttatcaccacagacgattgtttttagacaggttgaatttagctcatttttgcttttcacagagtgctaattagtgggaatataggggtgaattagagggcctttgctctcagggaacttttacattcttctgtgctttataatctaatagtgaagtagctgagtcttgacagtgttttctgttactgtgaactttgtgggtactcgatggtcttatttaaaatacacttctagttgttcattctggcagttacttcttctataaggagtttttattgtcctctgtaatttgcttaggtttttatgatgtttttagaatcttatatgtttgacaataaatttcatcaaatagtccttagttaagagcagttgaattttaaagtgttgtagtgcccgttattttgaaaatagactcctgttgtgttatgtaaggtcagcttcgaatctttgacattttgtttagttttaagaggagaatgataccagtttatttttatagaaaattacaccaccaaggctttgtttcagcatttctggttctggaatctagatggcttgatttgatctgagccagccaaaactgtgccatctgtaaagggagggagaacagctgagttcccagaaagcacctagcactgtgtagcatgtaccagaggttccagggagtggccgcagagctcagtgtacaagggtcttggcaccagacagctctcatttcagatggtcaatagcaataacttgtacaaagcatttatcttattattctagtacatttaaaattgtgaacataaacttactttccctaaatgttctttttcaaataaagttaatcacttgtgaaaagttacagcatagttcaagtattttatgttcatttcagtgttgtagtgaaaagtactgcattacttaatgtagtttttaatgtagtaaatactagcattaaatagaaatatttaaccttttatatgttaatgagaggaggtcaaagcatcctttgtgtatgtctgtgcgtgtacatatcacaagtagtaatttttatgtgccttttagaatttcatatacttaatttacattttgagtcttttgtagtagcagttatggttacacagtgaggggttttggccttccttccctgggcacacggttttgagatgactggttaatttgtttcaaagttaaatgatcctaatgagtattaaacatataaggttagctttattcattattatgttctgatcagccaagcagttcagcaaagaactgtgccgtgctctcatttcttcttgaaagtaggcctttcagagtgaggggtccgatgtgcactcacacatgcaccaatataaaaagggaagttgtgtgattactaacgtaaaactaaaataagaaatggtgtactttcataagaggaataaaaatagtccttttagtattattttcagaagtacctgatgtacacctgggaaattaactgttttatgaaataaactttagttattatacaagtgagtgactttttaaaagagtacttaacttacttagagcatatcaattttctgtagataaatctgaaagaatctttttgtaagtcactctaatttttgccagtttttttttttttagcttatttagttcatattgataggatgaacaaaacttaaagcatgtaaatcatgtttgatctaaggacagaaaacagtgtagtcctattccctaagagtattaaagtacaaataactgataaaaccacttttgaattaattaacaattaagggcctcactttgaacccaaaagtttattatcaagtgtgctacttattatggccttcacattttttatgtacatatgtattttgccttcgtatacacatgtatgcctggtttccaaggaggccagaagaacacgtctgatccgcagggctggagttgtgcctggttgtgatccaccatgtgggtgctaggcgttggacctgggtcctttggaggagtagtcagtcttcctaaccactaagccccttagtcagatttttatttccagtgctggtttataacgacttattgtgcaagtgaaaaatatttttgctcaggataagattgtggtttagcttttagaggtgaaactacagaggtacaaagaattaggtgcagctgttggacagagcctgatggtgttgatgctgccacaagtgaatagtagggggtctcttaatgtaggctgccagacatgttgactgcagagcacattcagtcactgtattttcagtggtatttttaaatttacttataaataaaatcattttgttccagataggttgatgatataatgcaacattaagacagcaagttctatgttaagtcttgtagtagttaacatttagcactaattttagaattttatgtagtttataatctagcacaaatctattgaatgtgtttgaaactgtcctttcagttcaaatgtaaaagtattgtatactttcataaaccattgatattcatgtatacattgataaccgtgtatacattcatgaaccattggttcactaacattgaaccagtgtcttaagtataaatttattttattttacttaactttatgtgtgtatgggtgttttgcctgtgtgtttgtctgtgtaccaaacgagtgtctaattgaataagccagaagagggtgtcacatcccctggaactagagttatgatggtcaatggccattgcatgggtactgggagctgaactctagttctctggaagggtactaaggattcttaaactctgagcatctctccagccccttaaaggttttttactccgcatatttatgatctctgtttttattatgtgcatgccatgatgcatgtgtggatgtcagaggacagcttgtaggagttggatctctccttccaccatgcagttctcaaggatcaaactcccagccgagaaggttggatgagtcaaaattaaactctttgttggacacatgtaaatgtgtagtatttcatgttttctttttcttctttcttttttttttaaaccagtactactttttagtacttgtctgtctgttcataaatacagcagcttcataaatactatttcttagttgtcaaaaatatagtaaaataaaaattatagattgtgatgtagctgaatacacacacacaatatactggagttgtttccttgttaagctattggttttaattttatgtttaatgtcaagatttgggatttttcttttctttttttgtagaacagatttttaatatttttcccacataaattaaaataatcttgtgtcactaaaatacctagttaggatggatggatatgcggatacaccaaaaacatatatcaggttgtattcttagtgaactctaggaacttgccaggtttattttcaaatttcttccttctcagacctaattgacataagaaataatagtatatttagtttgcaaagtgaggatagatattctggttttcctattttgcatgtgtgagtttggattaatttgacattcactttcatcagtcatacatagaaaatctgcttaactgtggtgctttcttttgggattttggctgtccattaaatgataggccttgtgtagcatcataaatactattgagtttcacataacatcctttatacaatctaaaagtaaccatggacataatagaacctggcaacaagacttaggggatttttgtcctgagaaatgtagttcctattccaactaatctgacacgcctcctctcacctcctggggggtgggggagagattacacatggcaagttttgaaaagaacataagggtgaagaagaaatctaccatttttgatggtcccattacacagagcaaaccacaagcaggctttcagtatggatttttccagtttttcctttgtgtgtacagacttttcttttttataaaagttagatttgtgtcttatactatttagttattacttttcctgtctgtatggactgttggtcctttggtttagagctttaaggttgactatttatcatactactattttaaacaatggagagacacttttgtacatttatcattgattacatttgtttctgtcttttccttcctccctttgctttaggctagattcccagaaatgggatctcaggtcagagggtagttgccctgtctgagtgtcttgctgcaccctcggtggcattgagcaggttagttttttccagtttttgccagtggggtcaatccatgctagagacttcatggtagtacctcagacttcatattattaaggatgtggaacactaagagtggacatttacagttcttttgaaaaagttgaagtgaatttcttttaaaatattttagatgaaaatgatctgttataaaatagacaatggcgttgcagtctgagcattgtgcattttatttattttgttttttgtttctaaaataatgaatatgagaaagtttattttcttgcaaaaaggtagagggggtggagagggatggtgggagggagagacagacagacagacagacagacatattgttctgacttaataaacagtgtttactaatggctctgttgttaggcaaacctagtccagaaccttgctttaacacttacgaagtccatgttattaacttgatgatttggtatttctgaaccttagtttcttatttttaaaggatcataacaatagtactacctacatcataagtttgttgaaaaggttttaaataatttgtaaggcggcttggcttataataggcatttaataaaaaacagctaatttgttaattattttggccagtttcagaagggggggtacctcacttttgtgaccttgtttacatgaactaagagagacacaaatgaactgtggtgtatagtacttaggagagagagaatggtagactctgtgtcaggaatggcatatgaaaagtcaggaagttcagaagatgaagagtgggatattgatttaacagagggatgctctgcagagatgcttagttaatcacactggctgctcttggagaggaccccagtttggtccccaacactcacgttgcttgtaactctagttccaagggacccaggacctgttctggtctctgtgaatactgtaggcatatatgtgggcaaaatactcataaaaatatcttccctaggtgtagtggttcatgcctttaagcccagcacatgggaggcagaggcaggcagatctctatgaatttaagaccatttagcttggactaaatagctagccaaatagtaatatttttgtttttctaaaaaatgtataacttgtgcagaaatctaattttcattagtgttgtgaagtgattagtttaactagttaatagagaattcttagttttatattttctatttctggaaatattgtaaaactgttcgctgtaaggtgaaattctttttcatgggttaaatttattttattttattttattttattttattttattttattttatatgtatgggtgttttatctttgtgtatatctgtgtcagagagaattagatcctttagaactggagtatgtatagctttaagctgccatgtgggtgctgggacttgaactcacatcctatcttaactgctgagacatctctcaactcagcccactccattttttacattcggtgtaaatggtcctagacttggaaagcatcagtgaagcgagcagagaaggtacactacggcagcctggaagtcaaggcagtgagatagagagcagctcccgcacgggacgctgaccttcagaggaagcatgcaagcattcccagtcttcctgttgcaagttttctcttggtctgttttttaaacgagctttcagacccagttttagtcattctagtacctgactctagtactttccacttggctgaaaaacctgtatgcaaagttgatctgacttttgatatcaatctgaaaataattcatatgaactgtgagttaggtgctcagtattatacagttgaaagccaaacaactctcttttagttttaagatgtttatatttttgccaggcatggtggtgcacacctttaatcccagcacttgggaggcagaggcaggtgaatttctgagttccaggacagcctggtctacagagtgagttccaggacagccagggctgcatagagaaaccctgtcgtgaaaaaacaaaacaaaacaaaaaggtttatatttttaaactagttctcatttctttctttctatttttttttagatttatttattattatatctaagtacactgtagctgtcttcagacacaccagaagagggcatccgatctctttacggaaggttgtgagccaccatgtggttgctgggatttgaactcaggaccttcggaagagcagtcagtactcttaacctctgagccatctctccagtcgccttatttctttcttaatgtttttttttcttccctccaaataatgtctaaattcagaaatgaaatctttaagatgctaggaattaaaatcctggcctgcatgtggccaggcacgtactccatcactaagctccagatttagtcccttgttaaggtttgttcagctaccattttagggtatattattaaaatgactcaattaaaaccctttttgttttagttttaagaggtagggtcttaatatgttacctaagctaccccaaaattcctggactcaagtgagtctactgcactgtgccagtctcagtagctggtttggcttattcgtccatttttacatgaggtgacttaaagtgtgtgagactcgcctttatgccacagttttgaagccagtgaggctggtagggaacaaatcacataggactgtggaatggtttgattctgtgataaatagaaagggaaggcacactgctcatcacttcctgtgtggataggtatatgtaacacttgggtctgaaggcagtgctactaagaatactagctaaaaacaaatctgcaaggtaaacagcagtttcttgtctgttaatctccaccccccatctctcttactgtggtgtgtgtgtttatgaattatgggcactggtacaaaccatggctcctgtgtggaagtggagattagaggactacctttggtgttaggccttactttccaccttgttttgagatggagttctcttgtttgctgtgtatgtcaagatagctggcctgtcctttgagtttgagttctcctctctcctccataggtgtactgggattgattacagagacaccttgcccagtccagctttatgtgggtttttgaggtttaacgtaggtcctctcacctgcccaactgagccctccccccatatcactttttaaaaaaatttttaaatacaacattactgttttctccaggaatctacagagatcagaataaattacttttagtattgcaaaaagcctaataaaattgtgtatttttggtatggtagtgtacacctttaatttcagcccttgggaggccaatttaggaggatctgaatttagagtcatcctactctacacattgagttctatgccagccagggctacctagctacacagcagaaatcctctgtctaaaataaaagaactccccctgccagtgtgtgtgtgtgtgtgtgtgtgtgtgtgtgtgtgtgtgtttgtgtctcaatagaagtatgtacataaactattgcctatctttgtttttttaactggtaacatgtagactcaagtctttgggcctggtttctatcactcattaacttatagttaatgtcagaatgtttgcctagtatgtaagagcgtaatgggttttattcctcagtctgtgaaattttctttgtttgtttgtggtggggagaacttagcattgaattacattagtttttaagtctaaaaatttgagaattctgattagcctttacttaatctgactagcaaagtaccaatgtacttggtacagaaagctctttaagaacatggaatccatagaggctacgtgttttcataggaaggttagaaaccactgataaattttgtaatctccttgggaacttaaagaaaggaactaatatttttttgctggtagaagtcttatcattccacttaaactgcatagtaagtctctgaagtaaatactggttgtcttagcttgctagtgttaagatacagtaacagacattatcacagtttggggaggaaagggtttatttcatcttacaactctgagctcacattccatcacagaaggaagtcaaggcaggaacttgcagacaggaactgaaacaggaactcagaggagcgtggattgcttctcttggcttgcttagcctgctttcttatacaactcagggccacctgtccaagggtgacatctgcccacctacatcagtcattaatcaagaaaatacattacagacttacaggcagtttgaatggaggtattgttctcaattaatgctcttcttcctagataactttagcttgtaactttagcttgacaaaataacaacaaaccaccctcactatcacagtataaaacattccagtttttgaaagcctacaatctgaaagaattcacattaaaagtttagtcttttttatatatcatttctttaaagttctaaacctctctaaaacatccagcgcttctctaaaatatccactttttctcagatttctaagtctgtcaagatttctgactctaaaattctgaagtcttatcatctgtgggctcttgtaaaatcaaaaatgggttgcatatttatgggggaagaaccagggcactgtcacaatcaaatcaagtggtactaaacttctacagtgttaagagttcagtagtttgacttctggaacctacttttgatcctctgggcttcaaagggtctggaccacttctctggttccattttctgcagcacacatagcttgtttcctaggatcacggccaggtccactccaaggccgctgctgtctttggtagtgctgacagggtactgggatctcccctgtaactgggctgcactttcattaatagcctctcctgggatctcttcactactctaagccggcttcatggtatcaagcctcaacttctctctatgggactctcttcaatttgaggcttctactgcaacggagggttcaccttcacaaggggcctttttcatagtgccatgcttcagcagttctccataaccccttgatgccttcaaaactttctcagcttcagctaaaagacaacccagaaagcaaaggtttttacttgtggtgttggtctcttttaatcacagctccagctgatgagagactacaaatttttttgtttgtttttgatatatatatgtatgtaatgtatatatagatatccatatctatatatacatatacatacatacacatacacacacacacacacatatattcaagacaggatttctttgtgtagccctggctgtcgtggaactagctctgtagaccaggctggcctcaaactcacagagatccatctgcctttgcctggcattaaaggtgcacactaccaccacctttaaaaagactacagattctttttcttaatttatattactagagattcttttatttatttacattctaaattttgtcccctctctcagccccctttgcagagttcttcctcccattcctctcacctctgagagccccgcctccaaatcttccccctccctaaggcatcaagtttctacaggattaggcacatcctctcccactgaggccagaaaaggcagttctctgctatatatgagggggccaggggatggggtgatgtggagttggttcagaccatcccaggggttcaggttagttgacactgttggtcttcctgtggggttgccattcctttcagttccttcagtctttcccctaactcttccataggggtccccagacctcagtccagtgcttggctgtatctacatctgtctcagtcagctgctgggagagcctctcagaggacagccatgctaagctcctgtctgcaagtccagtatagcatcagtaatagtgtcagggtatggtgcccactcatgagatggatcccaagttggacctgtcactggtcagccatttgttcactctttgctccacttttgtccctgcatttcttttaggaacagttttgggtcagaaaatttgaaggtgggttggtgacctcatccctccacaggaggccctgtctaattactggaagtggtctcttgaggttccatatccccactgttaggcattttggctaagtatccaacatatataaagaactcaagaagttagactcaaaaagccaaataactcaattaaaaaatggggtacagagctaaacagaattctcaacagagaaatcttgaatggctgagaagtacttaaagaaatgttcagcatccttagacatcagggaaatgtaaataaaaatgaccccgagattcaactttataccaatcagaatggttaagagcactgactgctttcccagaggtcctgaattcaattcccagcaaccacgtggtggttcacaaccatctgtaatgggatctgatgccctcttttggtgtgtctgaagatagtgacagtgcacttacaaatataaaatacataaatataaaaacaaaaaaactcaagtgacagcacatgctggggagagtgtggagaaaggggaacaaacactcctccatagctggtcgacttgcaagctggtataaccactgttctatcagtggttcctggaagttcctcaagaaatagtttctacctgaacacccagctatactgctcctggccacatacccaaaagatgatacaccataccaaggacgtgctacactatgttcatagcagccttattcgtaatggccagaaactggaagcaacccagatgtccctcaactgaagaatggatacagaaagtgtggttcatttacacaatgaagtactattcagcttttaaaaacaagggcatcatgaattttgcaggatggatgggactagaaagtatcaccctgactgagttaatccagacccaaaatgacatgcatgatatgttctcactgataagtggatattagccaaaaagtacagaatacccaggatacacctcacagaccctaagaagttaaaaaagaagaaaagcccaagtgaggatgcttcagtcccgcttaggttcttaacataaaataccatataaatgcccccagaagcgtctttcttccctttgaaatgtcaagtcaggcctctatcatctgctttgcttttagcattatcctccagataaacagcttaccaagttttgaacactcaatgacttttctaacccaaagttctgaattctttctgcagtcctcccaaaaaacatggttatatctaccacagcagtactcagtgatctgatagcaatttccgtcttagctttgtattactgtgagagagcccatgaccaaaaatgatttggggaagaaagtgtttatttcagcttacagctcagctcacattccatcactgagagaagtcagggtaggaactgaagccaaaactgaagccaaggggatcactgcttactggattgctcctcctggatggcacagccccctgttggctggaaccacgcacatccatcatcaatcaagaaaatgtcctacagaattgcctatagggagtctggatggagctatgttctccattgagttttctctttacagataactctagcttgtatcaagttgaaaaaacaacaaaaacaaagcaaaacaaccaacccgggcatttttaatcttaggttcttataagggattaaaataaaggtagttgtgtgctttatgaaaactcacacaactctaagtattattatgctgatacaaagcttcccaaaagatgagtagcataaggcaaaaaaataggtgctcagtaattgtgtgtcctgcttaaaaacatgaatgaaggacttagtaacaaggaactatctctgtaccagttatctgttctttagtaaaactacactgttttcctcttaggtctagactgtatagaaagtttcttcagaaatgactgctaagtcaagctggagaggtggctcagctattaaaagcattgctgctcttctagaagacctgggttctattcccagcatgtacatggtgcctctcaaccatctgttattctcaggggctctgatgccccttctgacttttgtgggaactgcatgcatgtggtacaaaacactcatacatattataaattaatatatgaaaaaaagttgcttcagctttttttgttatcctcttcttcagtgagagttaaagtacttataataaaatgttcttcaaaactcctgagggcagtgaaaaatcagatactttctttctttttttttttttttttaaatttattcttctctcatacatctctactgaagtttccccttcttcttctcccaatccatgcctcccacctatcttgagatccattgatcattcagaaaagagcaggcctcccagggaaaccaacccaacactatataacaaatttaagtttaccattatttttaatcttaaggaatggatgcccacctagaaattaaagtaagttgacagagggaagttggagacatgaagggataatgatagaaggtttactgtaggagaatacttggcatgcgagagagttgcttttctagatgtaggcaaatcatttattttcacagagcagaaatgaaaatggtgaaatgtgggccatgaggaggtaggttaatgttgaaggaggtgcatgccctgtatgggctgctgtagctcactgagaccttcagagagatgatgatgcgtcagccatcgttcagtgctcacagtttcatgggggtgtgccatctctctaggagtagtgtaagcccagacagaatgagaaagtttgttttggaaagaaaaaaatttaatttaattatttattttgccagagactaacataatttgacaggcttttaaaaaagataactttatataatagtttgatttctttttaatagtgtcaatttttttctgctaaactaatgtttaatggattttaaaaagaaagatttattcatttatttatttcatgtatgtgaatatattctcactaccttcagacagaccagaagagggcatcagatcccattacagatggttgtgagccaccatgtggttgctgggaattgaactcaggacctctggaagagcagtcagtgctcttaattgttgagccatctctccagctgtttaatggatgctaatgaagtaatttgtgagtttatttctaatctgctttttagatcctagtagacatgtgtggtggcacatgcctaatcccagcatttttgcatgtgatggctgtacatgaatttctgtgagttgggagaccagtctagtctacagagaatgccaggtacacaggacacagttctgtctcacaaaacaaaacaaaacaaaacaaaacaaaaataaaaaacctttgcttttgtttgtaattctttctaaaaacccaactttgctagtgtaggctattttattctaagtttttttcactttactcccatggtttaataatggtatatagctttttggtatgaagttttcattcttcagaaagtatttcacatgtaaattcaagtattattttctatataactatatatctgaattttaatgatacaactttcataagtttaattaatgtaagaatgtcattaatttatggaaagttttgagcaagtaatgtggaaagagatcttaatcttaagatctgcttttatccctgtgttagatgtatgctgtttcttttgcattcctatgataagaagtctggaactttagaagctcagaattggtcaatgctgaggaacaaatcctctcacactttctatcagcaggcaggcacggtgatactgtgctaagtcctcctctcagtcctccttttcaaacattcctgtgtcttttgatacttagttctaaaccttaggacagacttcagtagtaaaacatgccttgacttttaagtaaatgtttagtaacctctgactagtctttttagtcaaatgttacactttttacacagaatatcagcattataattcagtagcattgtaactccagcctgcatttagagcagtggataagttcagttttagaagctgtgtcgtcccattgtccccattgtgctttagacttgggctactgtcaccaatagaacaagcttgagctcctgtcaccactcagtaccatctgcttgtgtgtgtgtgtaaggaatagtaagccttagataatggctacaaagagtcattgctttattgtcttcttagctggctctgtttaggttcttgtatgctgggctgagttttcactccttagacctttaaaaagtctaaaagtgcctaagttggaaaaagttattttaaaaacaatcaaatactaataagagagttgtctttacaagacgaaccatcatcccttcccttccatcctgtggttaattttcacagtgtattaaatcaggtttttagtcctataagccacagtggtttttttgtacagcaaaccataaaaagtgtcagttgttaaggggaaggagcagatgagctgtgcctatggggttttcacggccatatgtgtgaagtttgtattagtgcagagtacaacagacaaagaaataaggtcttaaattgttacctccaaatcatggggctatggacagttattttaacacagggtcacgtggtgtagctcacagtggcctgaattggaggtccttgtacctccaggctgctgacagtccagccatgcactccaccatcccttggctcattacattcctttaaccttttatttttggagctttacccattatactgtttatatattttatactcagaaaataaaagctctaatatgaattttattagagtatgaaattaattttaaagatgaacgttcttaaataaaattagttaaacactacataatttaataaatatagcatttgaagtagaattatgagaatttttatatgattagaatttgtggtcaaactaaacaggagcaaaattgactttctagtttctgaaaatggggaatgagagatccggaaaaggtcttaagtgtttatgatagcatgccctggaaacttttatcattgtaattgcccagttacattgattttcaccactttattggtaattgtttataacagaacttaattttattcctctaagtggtatgctaagtctcattctgtgtcaatcataatgtatctgtgaccagcagaatattgggcaaaaaatttgatgtaatacttggtaggtgtttttaacctccttcattttcagtttctgcaaaatggaaaaatgaatggtatctaagctttaggcatgtctgaaagttaaataagtatgcccgaaatacgaaaagcacttaaaactttactcctgctgttcttattagcaaaagttggctttactgcctctcagacactagagtagaagatctctagagactggcggtgtatgtgtgtgcacatgcatgaagccagaggtcagtatcagtgcctccctcgcttcttttcaacagtgtctcattactgaacccaaagctcactgattgaactagcctttcacgccagtgagtttcagggatcgacctctctcctgccctcacagtgctgtgctgagattacagatgctgaccgctgcacatacgcagcgtttgcttagttctccatgctggcaatgccaggactttaccagcttactgtacccccaggcattccccattagttgagtatggcagttagcagttacatttatttaggcaggtaatgttttaaagttaatgtataaaatatatctttgacattcctatcttaacattttagaattaaagtaacatggaaaatctgtaacagtataggcagagtgctggatttgtgtgtttaagtactcattctctgaatatgatctggggtagagccaggaaagccagctgtactttatagtcttctggtgttcctcaggtgatagagatatgatactcttccagtttttttttttttctttccatggtttttattttagaattaaatgtatgtgttgaagttggggagagtggtattcattgggttgctttgattggtctatattttggaattttttctgcctcagtctcccaaggtgtcatgattgtagacacaagccaccatatcctagcaggttttatttttgaagctatagaaataaaagtatacattttacattcactaataaaaaataacgatgtcaacttctcaatgtatgttcattttgaccttgtaaattcattaaatgtacacagattatgtggctcaaactcaggttttaccagatttattttgagaaatgaagtgttgttggagatgcatctcggtgtagaatacttgtggagcaggcactaagtcctgggtttgacccatcctatgtccttaggaaaaaaacaaaaggaaagaagaaagcagagcataccagcgaggcatagctagagtgaatatttgctttctgtgtatctgtggtttattaggaaaggtagggcttgcttttcaccccagagagctaaattttctgccatcaagagtggatccaaagacctaaaagaaaacaaaggaaaaaaccgtttaactttactttctagcctattaatattttggtgtacagcattctccaaattgtttaatgtagttcttccatcaacagaaaccaaatcagatatatagtatttcatgttccccttttcagaacaaatgaacatactttaacttcctattaatggacagataacatagatgcttaactgttatttaaatgattccctatagcatcccatggtgttttttttttttaaataaaagttgttcagtgaatattatggttagtttttcccttatgcatcttaacttacgtcctcaggatagtttcaaaaaataagaattatttattgtatatattttaatacttttagtacatatgacttggaaaatcaaagttcctttctccaaagacaatcaccattagagtgtttgttcagcactgtattcttgaaatgggaaagtaaactgtaggttcactgtgggcaggtgcttctgaagggatgttggcaatgttttcattccatgtgcatgagtcttactctttaaagcagcgtgtcccttcttctgccgaaggatctttttgtttcccacctctttgtttgcttgtgtctgtctcataaattcctgactgcgatagagtcgctggatcacttaagaattgaaaatgctttatatgctcatctttctgctatttcattcttttggtattggcaccagattttaactgcaatatttttatagtcctttaaataaagaaatagaaaatatttggtatctgtgcaggtgtgcctgtataattttcatatacagcttaattttggctctaattttaaaaagtacttttaagccaagtgtgtatatgtgtgtatgtgtgtgtgtgtgtgtgtgtgagagagagacagacagacagacagacagagagagaggatgaattatataccagattagaataatacatacatttaataactttttagttcctggccataattcagaattctaaagctaccactgagtttgttatctgtattataaagtacttgtaagcacagtaaataaataaaaaggctgtgtattcttgagggtacctgaaagcaaaacgtattgtcttttaataccttttaatctttattgattgaagaagtatgaacttatacatatagtctttgatttggaatttgttttgtttcaagatagatgtatccttccctctctcttctggtgaagtatttatttttggcatcttatactgttctgttttggtttatttatagagttattgatgtatttcctatactttcttaaggtttacactctcataaatcaacctataccagaataggattatcctaggtgatacttctgactcagtattttttatacaatcttaatgtaattaatactatgctagattcaagcaggtttctttatggaacctctgtaaacatttcaagaaactatatttaagtttttaaaaatgtttttagcttttaaaaatatattcatttctttcagattcatttctcctatataaatttagctacttgtacaatttttaaatactttgaatgttagttctgattattttaataattacccataatctatcttccttccttctttcctcctttcctcccttccttccttcctcccttccctccttccttcctttttttcatttttgaagcagtgtctctttatgtagataagggtggtccttaactcacaagagacctagctggttctgcttcctgactgttgggactaaaggtgtgtgtcactatgccccagcctgtgaaagtctttttaaaaggaccccctcaagtgcatttttaaagctgatctcagtgacacacacacacacacacacacacacacacacacacacacacctgtaatcccagcactcaagagacacaggtaattaattgttcagccatcaggagagaaacttcctcctgtaccagatgggaacagataatagagacctacagccagacattacagagtgagagaccttggggcactcagccctaaatgggatatctccatcaaattcctctcctctgagctcagggaaccctgcagaaaaggagaaagaaagtgtaagacccaagcaaacaaggccctctaaaggaacatgagcaaagctcatatgaactcacagagacaaaagcagaatgcacagttctgtaccaggtcctcagtgattatgttatggcttccagtttagtgtttttatgggattactgagtgtgtgaacaagtgggtctctttattttgtgccttctcttgggctttttcctttgttggtttgtcttgtccaacttcaatgtgcttcaatgtgataggttttgttttatcgttttttttttttgttgttgttggttttttttttttttggtttttcgagacagggtttctctgtatagccctggctgtcctggaactcactttgtagaccaggctggcctcgaactcagaaatccacctgcttctgcctcccaagtgctgggattaaaggcgtgcgccaccaccacccggcttttgttttatcttattataaattattttgttatatatttctttaaaatgaataaatgaatgacaggcaggcaggcaggcagacagacagacagaccaaccgacctagtcactagggtaaaggttaacaactgaactgttgtaatcctgctgggagagggaaaatcagttttctccaatggagtgacactgggtatatcaaccactacagagaaggcctcatgttcagcatagttgaccaacatataatggactctacagttgggtgtgtgtgtgtgtgtgtgtgtttgtgtgtgtatttggttacagttgggtgttatttgtttgggtgtggtgctttgttttcttggttgtatggttgtaacgggttgggtggataggaaggggagaggatctggagggatttgagggaggggaaggatatggtcaaaatataaagttaaaaattgttttaaataacaaaaagtataataaaaaagaactttcaaataaattcacacaccagggtgggggaggggcaagagaaatgaaagtttgaggctagccattaagtaatgatcttgctatattttatttaaaagtgagattttaattactcttagtgttctggcatgttcacacctagaataaaggctggttgtactaaatctgcaattcatggtgtacacctgcccctccacagttcagacaggattgctcccaagtactagtagattttcttggaattaagtggttactaggttaattaggttcattttagaaaaactgatcttggaactagagagatggctttttggttaagagcaagcagtgctcttccagaggacctgggcttggttcccagcattcacactgggcagttcacaactgcttgtaacaagagctccgcgttcatgacacctctggcctcagcgggaacctgtgtcaggtgcacataaccacacacattcacttagttaaaactaataacagtaaatccttttgaaaaaaagcccatcttgatttgtattagtgctgtttatcaaagtgaaaacagccctttctctgatagtagtttttttttttnnnnnnnnnnnnnnnnnnnnnnnnnnnnnnnnnnnnnnnnnnnnnnnnnnnnnnnnnnnnnctgtcctggaactcactctgtagaccaggctggcctggaactcagaaatccgcctgcctctgcctcccaagcactgggattaaaggcgtgtgccatcaccgcccggcttgttttgctttttgagacaggagtctcactgtgttgccttcagctctcgtcttctgccatgccctctcaagtcactgagggcttgctactctgctcgactagtagtatctttttaatggaatggttataaaaacctaacattttaattgtgaatttataggctgaggtttattatttaaccaagttgaagatttcatgctttggcacaagatacagctttcatgaattttaagtatttacacaaagctgctcttttatcttagcatcacagttacaaatgacagcttttgcttgagaattcatgcattatgacttcagacctcccaccaaaccatgagtagcttcactatagctcttaccctgctgactgcctactttgtttcctgaagaccgaaggtacagtaaaatcgcaaactaatttaatagatagtgcatgaaaagaagatatacaattttaatttagttttgagctaaaatatgtgaaataatacaaaaattacaatgtataatggacatttgtattttataaaacttaaaatatttccattttcttactcgttttccatatattcttgccttattaagtattgtgatgtcagtacccataggactttaattagtaatggccacatgataacaaggattatttaacgagtctttcagagaatacatctccactgcttatagaaattgggagatttcatttttatgttttgtactcttaactaaaagtagattgtctttcaggaaagtatcgagtattagtaatatgtagaagcccattttttactctcattctttttgcccttttaataataatttctcagtttaagcactagagcaatatggaaaattttaagtcaatttagaaaagttaatttttatgaagtaataaattgcagaagcagtaaatacagataatcaaaaagtatagaagattacaagtaaaataaaatgactattgatttgttatttgtcctgagagaaacttctattaaaacatacatttttaaattttaattattattatgagtattttgcctcatgtatgtccatgcactacatgtgtgctgtgcccaaaaaagggcatcagatctcctgggactgcagttacagatggttgtgagccaccatgtgggttctgagaatcaagcctgttactcaggaagaacagacaatgcgcttagccactgaaacatctctctggcttccaaaatacgcatttaaatattttgtaattttactttattttttggaaatgtaggacaacaaatcagggtcttgtgcatcctaggcaagaccatggccttttaagagaggggtcccctatgtagctcaaactgatttcaaacccaagatcctcctttcttagtttccaaaatgctgaggatacaagcatgtgtcaccatcctcagctaacagcctctgttttagctttgtatattcacaagcttctaaattcaagtatgagctgggaatctggtgtaatggtacatggcacatgcccaggatcccagtatttaggaggcaggaaaaacactttgaactatgaaatacatagtgagatcctgtgtttaaaaacaaaacaaaaatacagataaagtgaaacaccaaaaaaaataaataaataaaaataaaataaaacttcaggaaagacagtgattaagtccatggtaccatggttttctttagcaagttgtatgtagatataaataggcaaacatttttataatgtttgtaattctctttttaaaaaaaagtaccattgcaaacttgattattccagttttggctcatctaaagtttataatttattcaggcactgtactggctggttttgtgtcaacttgacacagactggggttatcacagagaaaggagcttcagttggggaagtacctccatgagatccagctgtggggtattttctcaattagtgatcaagggggaaaggccccttgtgggtggcaccatctctgggctggtaatcttggttctataagagagcaggctgagcaagccaggggaagcaagccagtagagaacattcctacatggagctcttgctttctgacctgcttgagttccagtcctgacttccttggtgatgaacagcagtgtggaagtgtaagctgaataaaccctttcctccccagcttgcttcttggtcatgatgtttgtgcaggaatagaaaccctgactaaaacaggcactatacaatgacttttaacagtggtctccctaggttattatatagagtggagaggtttgtattaataagtaatgtgaatcataacattgtaactctactgtttgcgcacatgtttgtggcacacacacacaggtggggggacatggaagaagaggaaaaagaaacttatgagttaacatttcatcttctgagcttcagggctggaggagggtggagagcggggagggagagggcatgcacaccacaattcagcaggagacaggaggactggtgtctatgaactcatagtatataataagacttgataatgacaataagtgattgttactggtgtatgcttcttacattctactcagaaattacatgtatggagtagaaatgcaaagcattctagttacacttccactcaaagacaagttgtcaagtttctagactctatctgtgctcttcctgcttaacttgtgtgtgtttactataaaagaagatgctatgttttgctggcagctggtgagcctcatatatctcttgctcaccttaattcttgattaatcatttatctttgtctggtttaatcttttatttcattcatcatagtcccaacacacacacacacacacacacacacacacacacacacctaccactaccatttagctaagctattcagtaggttatgccatctagggcatgggcaagtgcactatgatgtttcacaatgaagactcctagtgacttaatttctcatatccctgcccttaagtgacatgtgactatacattattacagggaaaatcaacatcatttgtgtagtgcaaattacaagatggctgataagtcagtatgatattgaggttaacaacacagtgttagagccaaactgcttggattataatcatgattctatgatttatgtctgttctcattggtcaagttagttaattttattacctaatataagatgaagataatggatctctacctcataggaatgttacaaggattgaaaacatagtacacaaacagtgttcaaaacactgttttgtacatggtaagttggcaataaataatagttacagtcaatttattcttttgcaagggcttactgtatagctcagctggcctccggcttgtgattctccagcctcagccttcctcatactgaagactgtacaacagcactcaccctttgttcattctcttttctttctattttaaatcatattttctaccatttctacctgtttcttgtccatttcccctgataatatattaatgcttgcttcaataaattagaccaggaagtagcaatttttctccataaaaggtagcaggtactatatattttagacttttaggtccatggggtctcttgaatatagtcaactttctatatctgtactttcaccaacagtggggtcagaaactttctgtaagttgtatcttctgagaaacctcagtttttcttcttcaggcctttgtgcagtttagatgttgcttacccacattattgaggataacatcttaaaatgaactgcctgtaaatgttaaccacacttgcatagttactgtagagcggtaccaagatgagattcctgttagaataactgagtactgtagcctagccaggttggtacggctctcaaacagttcagtaaatatttattcatcacaaagatgaacaagtgttggaaatgatgaataatgaaagcagaaacatatgttggcttgaaggataacagaataacagaacttaagttgaaataaacaggtagaatccccaagaggaattagaattaggaattaggtatgtatggggtccttgacttcactgtgcaagtggttttcttcttatttttttaaggtgtaccatagtcaaaattaatgggctttatccattaatttttcttaagattagcttcctgggaaactcattgtaatggccttactttgattttagttcatatttcctttattcagtccagagaaggacaccttgattgacattcacatcaaaactgtatttatggagataagggttgctttccaatagagaatgagaataccgttgttgtcaagaaaaggggcaagagggacaatagagattcaaaaataatgtaactaaattcaccagctcttgttcccacagagggacaggtggtaaagacccaaaccaggcccagaacatgtaaaattccacaagctcagataatgagttgaggtcttcacagacatcattgaaacttgaaacttttgggccttctaatctttacagaaattattcctgtgctttaaaagcaaagatttttgttctgtattcatttaagttgtgtttcttatatttcctaaagtgcatatttgactaacaacggatagagagaggatataatgtagtacgtgaggaacgtaggcgagggtccccagtcgccagctacattctgaacacgtggttttggcttgcattagaagatgacttgagaggcgtaagtttgtacagtgacgaaaatcaagccccttacctcttccttcagttggccagcctccctatgtactactaattctcctctgagttttctttggggaagtctgttaagaagtgatgagggcctttatgaacacagtggaaatagagacaaaaaagagtaaatggttgaaaacagtgttttagaaaatgaaatttgtagaagtagcttagctaccagtctcacagattgtaagttttctagctttcaggacttgcagaaatacgaaggacaagtaaagaggatggcatctgatgtgaggacaggttcatgagacttgaggacaaaagatgatagtgaccagatttggtatatcaaggtaactcaggcagaaagacagacactgcatattctttctttttgtggatcctagctctggagataggtttgaatactgaggaatttttccttatcaattgtgagtgtgtgtctaatgtacataacattattagtctctctaattcgtactgtgttgagaatttgctcttcagtgaaaatagctgccctatttagtgtccaggtctaagtttacatataaattcctttgtaatccttattcttaagatatatatatatagtaacaatgttaatatttagtaacaatagtttccattttgtagagcttatgtttgtatgcttaaactttgtcatttaatatgaaagtaatcttggtaatttagggtttattctcatatactacattttattttttaaatatatcttaattacttttttaaagtagatatttgcttttcccataattatgactattcataattttaattactttttatgagttttttttttactttcagagaccttcatttgaatgttttttaaaaacatttattttatgtttatttattgcatatatgtatatacatgctgcgtgaatgtcagggtaactctctggaatcagctgtggtcccagaatggaattcagtcaggttgttaggctcagtgacaagtgtcttcacctgctgagccatctcactgtcccagggtgtggatatctgtgacccttgcccactgcttttcagcacactggtatcaaattcaaggtcttgtgttctactttctcaatctaattttctctaacctaccacagtaggatctcctcacacattctagataagcattcattctataaccaagctaatttcccagactgctatctaatatttctttagttgaaagaaagatacagttcattaagaactctggagagttggttcagtagttaagagtattggctgcttttccagaggacccaggttcaattcccacacccacatgacagctgacaatcacccttctctccattcctaggggatctgatgccctcttgtggcctctgcattcactgcacaaagtgcacagtctaacatgctaactcaatgtacttaaataaataaaaacaactttttttaagaactagaattaaagagatagaactgtgattaagagatattttcatcaagcaggtttttcccagtgttcacattttatttctagtcataaacacttctaaccaaaatgttctactcagtaattttcatggttaaatgtcttaagaacttgctcagaatcacattttctaagaggctttcattgatgcctgcaaacagtctcttattttctagatttgatgtaaacaatcgggaataatgaaagtgaaggtagggatagttggttatgttgatgaagataagtagagctgaataattacaaattatttcctggtgccatttttaccaacagacagtatttcaaatatttaatgtattctgtttagcaagaatggtagcacattttcaagcattttttagatctgaaaacagatctaaagtcattggtttgggctttatttaaagaattcagccatcgtgaacaaagaaacctactgaaacaggaccaattttgaatttttaagatagcagataaaattgataatgagagtgaatctatgaaggaagtattgccttgtagatcagcctgttctattctattgggttctgcttattgagtcccttttttttttttttttttttttttttttaattaccttctggtcattggataaggaatgaaagtgaaagcacacatatttttttcttgctttatgtttttgctgtgctcatactgtagaaaatgatacatgataaacacactattaactttactagtccataggaaagctagcattttagatagagtttaaggtaagcctgcaagtaccagtcttgttcttggcttctgattctggttccatagattattgtgggtggtcgttggtaaaatacttttccttcctgacagccctacttttcctctctccttccctctctccttccctctctccctccctccctccctccctcnnnnnnnnnnnnnnnnnnnnagctaaaagctgtaactcaagctggtctcaaactgtgtctcagtgtctcagttgctggaatttcgtgaggctccacttcacactgctttctaactttacactttttagctgtaaaatatgaaaatgtcattaaaaaggtgcactcttgttatttgtggattgggtaggactggagattgttttgtgtgtgcctgtttgtggacaccagaggacaacctctagtggttttcttgggctgcggtccacttttttttccttcagtcagggttgtttgctgcctggaactcaccatttaggttagccttaggaaaaatctgtttccacttccctaccgctggatctatacatgtgagccaccaggcatgcccacattcacacatgcacttacacacacacaaacagcacacacacacactgatggttggttttgttgttgtgggaacttttgtttttatgagttctggagcttaaactcaagcccttgcgcttgcagataaaccattttattaattgggtaatagactcaagtctctgggccagcatttttttttgttaaagatttatttatttgtttaatatatatgaatacactatagctgtcttcagacacaccagaagagggcatcagatcccattacagatggttgtgagccaccatgtggttgctgggaactgaactcaggacctctggaagaagagctggtgctcttaaccactgagccatctctccaaccctagcaattcttatgttaagaggaataagtcattcttggggagacaagcacttcattttcttacccatacatgaatataatcaactgggtttactagtggctgagagtataatggtggcttcccagagactggaggagtggagtatagagaaggacagagtgtggtaaattaatggtacaatgttacagctaaacaggaagccaaggtattccagactgtagataatgacagtgtgttttaaaagctaaagaaagagatttaaatgttctcatcacagagataacaaacatttgaagaagtagtacacattgaaacaccacatggcatctctcaaataggaacaatttttacgagtcagttagatgactcataaattagggtcgtgcagataaattatcatggtctatgtaaagtccctttattttcttattggtgatcaatactttgctactgattatgattttgtatatgaagtaattggttgcttctcataaaagttttaataggcagttaatatttaaagaatctaggaaacagtattcctcttttcctagaatgaactaaatatttaaaagagtgattattgtcttagattcctatgagctgggcattggtttggatgcttttaattagacttaattagtcttcataccattcagtatctgaaaccagtttgctgatttttattcctctattagaagggctttaaaaaaatcactgtcatgttctttgatgtcattaggactcaagaaaaataattgttatgactatgaagacccagaggactcttgtttatacttattttgtacttactttaattatacttcctttatatatacttactttaattataaaaatttggtttatacttactttatacttatatttactttaattataaaaatttggtcttggtttacaattcttcctgcattgtatatgagtgatggtgcatctcacttgatcttgagttctgtgaaaggcagcccagatagcatcactgagaaagagctgcttcagagtagaaagctaactgccatttcttcgttttcactctgctgtatcacagcttctgtgcatagtcacttcctacaaagatttaatctttgtcgagcagttttgaggttcacggcaaagctgggcacacaatacaaaggttctcacatgctggctgcacctcttcctccgttcacagcagtgcccaggagagccactaggctggtggatgagcacatggcacatcattatcactgagtgacacactgcacgatgatcatcttctttccatgggtttgaacaaacgtgtaaatgataatgttgtttgtacatgatagtactatattgaggaatgtcaatgctctaaaatgtgccagactcccccttttatttgttttgattgtatataaagtaagaaaaaaacagtaagttctttcacattgtattactacacttttcaccttatggctttaagattcagaaatacttgatttcagcaggttttcaaattttatgatgtttaacaattaattgactataagtaaaattttgaatcacaaaatctgctctgtatagtgtgtgcatatcttgtgtgtgtatgtgcacacatatgtgaagggcagagacatccttgggcaccctacaacttctccaaatatgctagacaagctggccctccagcttttaaggctcagccatctccacttcccaacttgctgtcaaaggactacaggtgttctccaccatgtcctgcttttgacttgtgagtgttctaggaacccacactcaggtcctcagactttccaggcaggagctttactgattcagctgtctcctcaactatgtcttagaacactcttagacaagtgactcacggtagttgctttttgtcttcccctatctcttttctgttatttttgggataggatcttattagtattataggtatatgccacactgtgccctggtgaactgtccaatttgaaaaacaaaagtgattttgtacttacagaaggaattttcaaaactaccgtgcattatgtcatataattcctgtagtgagctgcatatatatttttacacatttcttaaattaatatatagttacattactttctctcttcctgtttctccagcatatctcaagtcgtctcctctttccattcccctactctcaaattaatagcctccttgtctttttattgtcattgttatacatgtatatatataatcttgtacacacacacacatatatacacaagtgtatgcaaatacaaatgtatacatacaatctgctgagcctgtttttggtgtttgtatgtatatggtttcagggctgaccttgttgtatttggataaccaattaggaggctatcttagttactattctactgttgtgaacagacaccttgaccaaggcaactcttagaaaaggaagtgtttacctgggggcttgcttacagtcttagaaggtaggtgttttacctgcatctatgcctgtgtaaggatgacagatcccctggaacttgtgttacagttgtgagctgccatgtgggtgctaggaactgaacctgagttctttggaagaacaaatgacttaacaagctgtaggaaattggctaggttactagtgcaagacatgattttcctcctgttgaattgaccttaagtccacttagcagttggttaccaccaaggtgtgtgtgccatctattgcccctctagtggagtgctgtctcggcttctttggtggctcataggtaccacagctgagcaggactacttgctttccttcctaggcagcttgcatagcttgtattttcaggtctggaagctagactgtaagaaggaggctttcaggttatctaatccaagtcctgtgtccaaagtatgcagtgtctcattcacaatatgcaaaaacctcaaaaaatacaaaaaacaaagaatctcaagaaataaataacccaattaaaaagtgactaggaatctaaataggatttttcaatagaagaaatatagttaagaaataccacaaaaagaaataacttcatgggggctggagagatggctcagtggttaagagcactgactgaaggtcctgagttcaaatcccagcaaccacatggtggctcacagccatctgtaatgagatctgacaccctcttctgatgtgtctggagacagctacagtatacttagatataataataaattaattaatctttaaagaaaaaaagacataacttcattatccttagcagttagggaaatgcaaatcaacagatttgagatgtcatcttatcccactcagaatgactagctagatcagcagaacaactgacagcaagtgctggggaggctgtggggaaagggaaagcctcactccctgttggtgggtgtgcagattgatacggccactctggaagtcagcgtggggaatccttaagaagctaaaaataatctaccatgtgacccagctataccactctctggcagatacccaaagaactggacaccctactccagagctacttgctcagcagtgttcattgttgccctattcagaataactaggaaatggaaacaacataaatgtccctcagtagatgaatttataataaaaacatgtggtacatctacacagtagaatactatttagctgtaaggaaaaatggaatcatgaaatttgtaggtaagtggatagacctaggaaaaattacattgagtgaagtaacccagacctggaaagaaaaaacaaaacaaaacactacatgttctttctcatctatagttcttagctccaaatccaaatatagaacatggaataaccacagaaaccaggaaagtagagagagaccatggcaggagtgcctggcagaatagcaggatacaagtgatatgaaacaggaaacaaaaatggaagggggggtctaaagactgaactctcttggtggcaatcttagaggccctgttggtgtgtgtgtgtgtgcttgaaacataaaagttttgaattttgatgtccagtttttttttcccttttagtggttgtgtttcaagtgtcatgcctccaaagttattgctaacccgtgtcatgcagtttctatctgtgttttcttccatggaactttacttaagctatatcgtttagagtgtgagccccatttggtcagttttaatatacaaaatgggatcattcgttttttacatgtacatctggtttcctggcactgtttattgaaaaattgtcctttcctgactgtctcctgtaaaacataatttggctgtgtttgtgaagatttatttctgaggtccctattttctacaattcctctatatattcatttctacactgttaagaacatgaggttcttaatagatgtgggggtgcctgcctctagtctcagcacttgggaggcactgaggctgaaagatggcttctagtctacatagtgagtttcattccagccagagatacataaaaagaccctgcctcgtatactcatataacagcaaaatactaacttctcctttaatttcttttttaaaacttggaatagtagaaatatattgtttccaaatatttggagattctcatatctttgctactgattctaaatttgattctatcagttaggatatattttgctccatgcagttaatttttttattatatatattaagtacgcagcttaatattatacatattaagtacacagtttcttaaaagactaaagatcataatgtctagaactgagaaaataagtaaataaagttatataaaagaacaaacataaagacttgttatatattcagaaaactgacttttttaaagttcacttatttaaaaatattgatacaggatgtaagccattaactattgcttcactgccttaaagaacaattttattagtgctgcttatgtggagagacgaaaactactcatgtgactatcatgtcttagtgacacaattcaatgggggcatttttatattatggaaaagataacaagtttaagtattgatcattttagaaatactgcctaaacatttaaatatacattccttccccaatctattctaatacagtttatggactattaagtcaagcttcagaagttaaacttttagcattgatatagtcaagctgtaaaaggaactgagactggattctgacagtttttctttcttacatagagcactatctattagaaatgaggatgttaactattccacactggaatcagtttcaaagatgaggccaggaaaccatgaaatggattgaaaagggatgaaaagtgatggggaagaggagcaggctcaccacagcagagcatagcaatttcgtggaaaacaaaaggcattttgtatggattaaattcccttacatttattgagacttgtatttatagtatagagtatttactctgttggtaaatttttatatcccctgaaaaacaatatatattctattgttgttggtggaatattctctgagtgtgggtcaaccctgtccttactggctttgcctattagatctgtcagttactgacaggtgctatcatctgtcagtacagtactattattataagcaaatgtgagagatttgtttctgttctccttgtttatacattttggtatgttgtgtattcatttccagcaaatgttatttgttagatcagcaaaaggaaaagtgaagtttatggtttaaaccattgtcatttctaaagaatctcacagttcttgcaaggtaggcctgttgatgacaaatctgttcagttgttgtttgtagaagtcttttctccctcattttgaaggataattgacctagatacacaattatattgcggcagattttgtctgaatgatttaaacattttgctttatatccttttttgtggttggaagaaaattctgatgtaattcttatcttagctcctcctccctctggctcttttggccattttactctttgttttattttcttgctgtctgagtatctgcccaagtagatgtttttatgttcactctacttggtgtcctctgcattttctgagtttgtggtttaatgtttttcttgtttgtttattttttagcagtctccccctcttcccagatcctctgcttggcttcatcttcaacttggaaactaattcttgccacctccactgcagctgctttggtccatgctgtcttgggtgcttgcggttgtcttcattcttcttcctgcctttgccctttatctatttcatagctagaggaagcttgacagcctctctgctcagtcatccagtggcttcctgtctcatgccagctaacagccaaagtctttgccatggcctgaaaggctggatttagctccgtttaggatcttctagtaattaatccctattgcttgccagtcttagggccctctttttcttatggaagttgccagtcttctggaggctttgccaccttgctcttttgcacacctctgttctttaatttcctctggcccccacacactcaaatactgcttttgaaaacataaaccacatcgtccatgagctcctttccccattttgctgcgtcattattctctgaagtgtttgtttgtttgtttgtgttactgggaattcaaaccaggccccatctcctcactaaagcattttacctgcagaggaaatctctggcagaggagaatatggtacactgaagaaaatgaatgaaagccaattatgctggactgttgagaacagagggggcacattgtaagataaatctagggagggatttagagttcaaattataatgttccctcttaggccttaagcatttctatctttatatttaaaggtaatggtggtcactaataaatcatattactcacttggagggttataaggaagtagttactaaagtgactgatttgtcatgttatgaaaatcatcccagctactttgtaaagaatagagtggagggggtatattacttactttttggggttttgtttgtttgtttgtttgtttgttttctgtgataaaacactgtgacgaaagcaacttataaaagaaagtgtttaattggttgggcttacagtttcggagggttggggtccaccatgacagagccctgtggtagcaagcagcaggcacgttagctagtgcagcagtgagagctcacatctcaaacagaaagaatgagtgcactaggaataatgagaggttttggaagcctcaaattttgaccctgtaacatacttgcctcaaacagggctacacctaatccttctcaaactggatttaccaactgggtaccctgtattcaaatatatgagcctacactggccattctaattaaaatcaccacagggaaaagactgagtttgctgcaatcagatgacagttggttccagtgatttaggtgtcagtttttggtaggttgttgatgaccatttaaaaaagaatggttggagcagtaaaccttcaatgaaatatatttataaatatccttaattagcaatttttatctcctaatttttatctcatcagaatgagctttctaattttatacaatcttttgattctattttgagaaaatagaatgtctgatgtaatgtagatctttaatacacatcctagaaagccctgtgtccttttgtatgtttcttaacatatagcacaaaatcaagcatctctattatttaactttcatttacattagagctagacttggttttgttttcaccctttattttggagtataaggcaacattatagtttcagattgttaaataaaccatatgtaataaagtgttgacaggaaatatgacctgagttctggaagagtggctgttctccatttgagtgtataggaaagagaacaggtgtgaggtcatctccaaaggagaagagaacacatactcagtggctgcgactcactgggggcaggggggcaaggaggctgggaagtgttgctcttcccacactaccttgtgctacccctagaaacctacctgtgcttttatacaagtctgctctgtttctaattgctaccgtgttggggtcaacttttgtactacatgttttctcaacactaccactaaatgcacagtcaaagataatcagagaacctagagtgtaaagtgcctcttgcctaattaattgttatactcattttgcataaaccaggcctgttttggggtttctttacctccaaagtgaagaccattcattttctccaatgtagcccttccctacagctaacctccaatggaaaagaatccaaatctgctttgggttttatcaattccagttggcaaaataaacttttcaatgagacaatgcctgcaggcaatgtgttgtgttgttttgtttcagcttcaaaaaagctgactaactttgtcccctggttttgttgtggcagcaaagtgccttcgacttcccagcatcacctcaggctagggccacttcaattgtagaccaattctgtacctttcaatctaaggttaagaatcagtatgtatcctccagctgccttgtaatttagggttcctacattgatagggttggtgaacgttgtgtgtatattatcttatttgttgttcacaccagtgtttttgaactggtaaagattaaccaatatctcattttccagccccattttcattcgattctaaaggcttcctaggttattgaactgggaactcagtgggaaagatggacattagtgttcaataaaatctcgctttgaatccagccttaattatttcatgcagtatttattgaatatcaaccattcccaagtactgtttgaggtactaggatggcgtctttctttataatattagggaagatatattaaccttgaagctgctaaaaattaaaatatattattagtaggcagcttgaaaaaaattgtttccttcccttcctgtggtcttcctccagtttattccctgctgacacccccctcccccccattccattctacgtggtgcttacagggctctttcctgctttgtaatacagatgttctaggttcttaggatattataggagaccacagtaacctgatgcctgctaaatccatcctttgtgggactggagaaatagctaaattgccagttgtgcttgctgctcttgtagagaaccagagttcagttcccagcacctacatcagatgacttaaaactacctgtaactctagctccaggggattcaacactctcttctggcttctgtggttattagcacttacatgccacaccctcatacagacacataaatactacgtggttgttcctcctctcactttatgtgttacagtaaaagctcactagcttactccaagtctcttgaatctgccccccaccccgaaattccacatcctttatactctacttgtactgtcttcctctcctggccttcaagtattacatataaaacacagtgatgtatactctttacaccccctcccatcgccttccaaaggtgagcctgtgtataaatgcaagtttctgtatcgtgtatatgggtagaggcaagttgacatgttagccagtgaactctgaagtcaaattgctttagtttgaatcatgccttttctttttagatatggactcgttagcatattatctattaattagttcttaccttctgagcttagtatgacttcctccttcacagctgacactggaggttgaacctgtggccttgcctacaccaagcagatatattgccactatactatgtcctcaggccccttagtatgagttatctatactaagtgaaatgtaggctgatattatttgttgttattatgtaacaaaacaaaatatattgaaaagctagtgccattttaacactagagacaggttggattatgccttcctagttattttatgcctaagtcatgtaacccaaataaaaccctttggtggtttcccattataatggggacaaaaatatgttttaaattttttgatttcttaaaagttttgtaaatgacagaatgctatataaagttcagttgctgttggtcatatagtgttatgtttcaaagtcacaacattttggctgaataggagaaatgaagtctatttaaaaatatatttttgggtgtggtagttcatgcctacatctctagcactcaggaggtcagagctcagttttggatcaagctgtacctgcatcaaaaaatagtaaatagacaaatctatcagaaactttgtaatagtgatcttatttctccccaaatgactctaaactcaagcttatttaagattataaatatgtagtttacttggcagcgctgcaaaggaacaaaatttgagtaaataaactctcatttatggaagtatatctgccagtggattctagaattggacacatttaactgtgcttagcagaatttagttaacctagtcttttaaatttttttttaaaaagttagtcaaccttgaaagtattaatcttaaaatttttagactgaggactgggaaggtgactcagtaaagtacctaccctatagtcgtgaggacctgaattggatccctagcacccatggaaaaagctaggctggtacagtacgcctgtagtcctattggggatcagaagtaggagcccaagagttccttggccagctagtcttgcctaaccagtaagcttcaggtcccgagagagcctgtctcagaacatgtggttgaagtgggagaagacacccagcataacccgtttacatatgcatgtgctcctacacactagacatacaagggttttcagtctggtttataaatgtctttattgagcgggtgtggtggcgcacgcctttaatcccagcactcgggagacagaggcaggaggatttctgagttcgaggccagcctggtctacaaagtgaattccaggaaaccctgtctcgaaaaaaccaaaaacaaaaagaaaaaaaaaaaagtcttattgatggtacccatctccatgtccatcactcagcagtgctaaacaggatacaggcagtcactaggatacaggatacagcattcactaggctttgatagctcatggacgcagagcacatgttgtccccaaacgcagagcacaggatatttttggatttggtactgttctcccttctgttaattagaggcattcccagtactagacatttagaataaaaagttacagtcatagatactttgacaaagatcatcccttcaggatgaatgttaaatcatttaaatatgagaaataagttttacttcagagtagatatttgatttaatgtaaaaagtacatttgagattttcattttaaatgtattgttgtttctagaaaacagctcagtttaatgatttaattatgcaatgtgtaaccttgatcacctattgcaatgtgaactactgcattagtaggcgatactttttaacatatgaaaacaagacataaaagaaataatatagtttctttctgttctgcagttgtgccctcagcccttcttgtttagttcttttttgtttttcaagtttttattaaatccatctcagcttgtctgcaggtttagtgaggcacactggtaaaccctgtctgtcatccaggaggctgaagtaggagctgcctttgaagccagccaggatatgttgcaagtcattccagacaagcaaacaaaccagcagtgtcagaaccagtctcaccaactcacttgcttcatagcatgaaaattcatagttggaaaaacatgcttgtttaaagttgtctttcagggatgaaaaagatccagaacaaatttctccctaaattagaatttatattacttggtttaaaaaactgtccttttaggactgtggatatgacatgctacaacattcagccacacagcacatcttttccagctcctctaattcaaatctggaattagttattaaaaacaatgctgtaagattggtttgtttacgaatgagattaaaagttctgcttttctctctgagacagggtttcactgtgggacacagtggaggccagagggcagtctcaggtattagctttcaccttgtcccttgcttgaagcgagatctcattgtccctgagcaggctgcatacaccaggtcgggtggctcacagtcttcaggattctcctctttctgccctctatccttactgtagaagtactgggattatagctgggtacattcctatatccagctttatatggattctgggaattgaaacgcccggcaagcactttgcccataagcccttccctcagccctagaatgtacatcttataaaaatagtatgctgagatctaaggacaacagttagtattaactgaaagtgaagataaaaagcgtttcagttgttgcttaatctccacagcatattggctttacactgcaaccagaatgatcttttcagggtgtgtgtgtgtgtgtgtgtgtgtgtcttaccatggttgttggtttaggagtgtcaacttgacatagcctagaggcatttcaaaggaaagcctccattgaggaatgacctatattgtctggcctctggccatgcctgtgctgtagtgtttcatttttgaaatttttttatttttaattctgattttttattggatatttatttacaattcaaatgttatcccctttccctggtttcnnnnnnnnnnnnnnnnnnnncccaccccctcctgcttcctggccctggcattctcccacactggggcatagagccttcataggacaaagggcctctcctcccattgatgtctgactaggccacctctgctgcatatgcagctagagaaatgagtcccaccaagtgtgctctttggttggtggtttagtcccagggagctctgggggtgctggttagttccaacagcaacaacaaaacaaaaaacccagacacagtcactatccttatagtacagactctacttaacttgtagcactttgtacataggcacttttaacataatatctaaagccaaaaatgaagaagcagcctccaatactcaagtaacctaattgtaaattaaggtaatagtgacccccttttttggtaaagctagtaacttctattagtgttaagcaactatggcatacttttgagatggtttggtttgtgtttgtacagtgccgggtattgaactaaatttttgtgaatagtatgcaaattaccttgccatcaaaccacatcctaagcacaaagtgtatataaaacgagtaagagagatggatgcttttatagaagcaaccagagcagtaatggggaaaaaaagaagactgcttacagcagaagaatacatatacagagtaagagagaaaaaagagagaaaaatccctgttcaaatgttagaagtctggaaatggaggaggaattctctttgttgtatttatagcagtggacagaactgaagccagctagtgaccactacaagactcagagcaatggaaagaacttctaatagctcagctgcccagaagtggagtggagttttatttgcagtagtgtttaaagagactccatgaccctatggagctctggtggcttgtgattaaagaagttcttatactttaatatttaagcaggaaaatgcaaaacaacacacacacacacacacaaaaaaaacccccggaaaaacccaacccaaaacagttctttgtttaccacatctaagttaagtatattatattctagtttttgtatttgtcagcattgactggggtcagggttcttttcattgtgtgacatcttttgcactgttcttaatatctttgtttatttaccactctcttattgtttgtaagtgagggtgcagtgaaatcacccaactggaccactctgtggctacatagaaagaaaggtttaatgagggagcaaactgccagcctgcctctgagagtagtggtttgctggaaagcaagtggattttatatggtagttagtaggatgggggaatctttggctgatgaggctatgtagatgctcttgtctgaagtagttgaccattgtgagcagataaaggaggtcatggttttcctggtaagtaaaaccctgccttacagagattccggaggagagcttacccaatataacaatcctgtttacctgtcagaatccttctatttcggacattgttactagcattgccattttgggggcctgatttggacctaacagtattgattattcagtttctgagtcttattgaatgattgtgtgtgtgtgtgtgtgtgtgtgtgttaatttatggggtagatgtggatgtgtgtagggtataagtgtgcttatatatgttaaagttagaagttgatgtcagatgtctgtgtttattgttctccaccttatatagaggggacttggaattcactgtttcgtagaactggttggccaagcagcccttagagtttgcctcttatccccaccacaactccccttctgcctgtccccacctcactagtcctggagttacaggcatgcactatcagaccacaccaccgtatttggctttttacttgtgtgctctgggaatctaagcgcaggtcctcgtgcttgtgtagcacccactttacactgagccattccttggcatctttcctagtggtttcaaaagtatattcatctagtttgttgacattatgttttccatagttgtttgaacttgaaatttttccatagccgggcgtggtggcgcacacctttaatcccagcacccgggaggcagaggcaggaggatttctgagttcgaggccagcctggtctataaagtgagttccaggatagccagggctacacagagaaaccctgtctctaaataaataaataaatagaaagaaaattttccatgtatagaaatactcatcattaccttttccccaagcaaaggaaaacttatataacaaagccaatcctcgggcaatcagtaattctttgttaatgatcaaagccttcataattcagttccacttctcaaatattatactcttaagatacaacttacatttccaacacatgagattggcagacactcaggtcacagcactctcctagaggatgttccctatctctggttttcttccacactctggtctcagtgtagactcagtaacttacccttattttatttaagccatgcatttttcttcatcccatctaccacctttttatacagataatcatgtttttttataaatctctaatatatcttttttattttttataaacagtacaaccctgaaaagtctttaaacatttatttggcagcttcttgcagggtctatcatctgtttctttaggttttgttattattctcttaaatgtttttgtctctcaaatagttttctcaggtctgtggttatcttctctcatctaaatgaaattacccctccacctgttatgaacttgcttaacgttagcttctctaactcatctgtaaagctaaagataattacttgtctataacccctgttccagggatccattaccctcttctggtttccttggatactgcatgcatatagtgcacagacacgcaggcaggcaaagcacccttatacataaaataaaattaaatctttttcttttttcttttttttctttttggttttttgagacagggtttctctgtgtagccctggctgtcctggaactcactttgtagaccaggctggcctcgaactcagaaatccacctgcctctgcctcccgggtgctgggattaaaggtgtgcgccaccacgcccagcttaaatctttttttttttttaatgaggataattgggataaaactggggacactaagaatgttgtgtggattaaaaatactaacacatatgaagtgcttatcatgcacggtgtattgcacattgtaagcagatagcaataggttgcagttaatttttttttaatgttctgttctaatatttctacccttttcttgttcagtcctccagatatattactatttcttctggtaaactgtagcagggttttgtttttgtttttgttttttattttttatttttttaggatatatattctggtgaaacacagttggcatactatacccttaggttctgtattcagggcttcaatcatccctgaataaaaaagtatttctgtactaactacgtacactttttttcttattatatcataccttaaataacatgtaatggtaatttgtataatatttacattttcttaaagatggtcataacattaatattttgtcaggagtaatctagaaatgatttaaagtatataggagatccccatgaagacaggttcttgaaagatacagtgtttccttacttggcagtgatatgttagaaggaactccctttagaagaaagatactaactccagttactcttactgataatttatatgtatgtgcttgttgtacaagctattttattgtttttatagatgtgcttctatgtatgtatattcacaacccatgttatgtgcatatagtatatgaaaaatgactgaaagttagatatattaaccattttgttaaggaacagaggctaataaatattctgttgttggagaattcccccaagtaaattgatcaactctgaattctttccataattcctgttctcctagaaaattgggaggcatttggggaatataaccaagctcactgtttgctatattgtaactacgtcatgagagacacttacctgaattagggtactggtgagttcacacaatgattgcagtccccttagaggcctggataaggacagacagaggaaaccatgagcactgtccttaggtaaatgcgagaaccgcctagtacatgtgtaggagacctacacaagtttgtccagcaaagctcatcagctctcccccatttcttaccgtctctctgatagcatgtagtcattttcaggtcctcttcttagctttcctctcttttcactgagtgttccttagtcaatttcatagactgctgtggttttaattgctaccatttttctaggccctttcaaactcgagttttaaaaatagctatcaaattctgttacgtgcttttctcacaggaatctcaaatttccctaagcagtgaacctgcttcagttgcaggtgccctatcagccgattttttgctcaaactcggtacctagaagttgcgtttgcctttcttctttctccttaacaatcatctctcatcagttagagtcctaaaccttcaaaagagcatagtccccttctcagtctaatgctgctgtagaggtctccatcagggctcactgaattgccaatgtggcttcctaactcctttactgctgagccgtccttttgtcagtccatgttatgtaaatataaatgtagttgtaataacatgaagaaaaatcaccgtatcagggctggagagatgctcagtggttaaaagcactggctgctcttgcatatgacccaggtttgattcacgtaccttcattgtggcttacaaatatctgtaactccagtttcaggggatctggtgttctcttctggcctctgtgggcaccgggcacataagcatgcaaactagcagaacacccatgagtttaaaacaagtaaacaactgttttctatttgggtaactaggtaaaatgtaaactataatagggcaagtgcctttgcacaagtctatgctcagcttcacattccataactttgttctttgtgtggcaggatttcaatatgtaaccctggctgacataaaggtcactacttaaacccaggctggcctcaaactcacagaaacatgccacttgggtgctggggttaaaggtgtgaactacctcaccagccatagtttgttttttgttattgttgttgttctgttttgttctgtttttagccatatattgaaaacatgaagaatatcactaagggatttgttagatttttctgccaacgtgtagaatttttgaggtgtcaagtggatgcctgctgtttcaccaagaggcaaccctatttcctatcactgtgtaaaccctgagactgcagcaacatattttcttttctctcatattatgttcttagctttatctcatgtagttcaatatccatgcttggtagcccttttgatacagttctaagaagtatattttcaagtgaatagctctttttttttaaaatttttttttattaggtattttcctcgtttacattttcaatgctatcccaaaggtcccccatacccacccccccaaccccctacccacccactccccctttttggccctggcgttcccctgtactggggcatctaaagttggcaagtccaatgggcctctctttgcagtgatggccgactaggccatcttttgatgcatatgcagctagagacaagagctccggggtactggttagttcatattgttgttccacctatagggttgcagttcccttttgctccttgggtaatatctctagctcctgcattgggggccgtgtgacccatccaatagctgactgtgatcatccacttctgtatttgctaggccccggtatagtctcacaagagagatgatagtacttgggatttaatcatactgtgaaaaaccagtgtctgcatagaacatgcacctagaccagaagactaagtatattgacaattccccatcaactccatggttagtcattgagtaagagcttggcttactattggtcccaaactcaagggatccctctgaggattgctgggactttcagagcctagctccctttcctctggtgtatttccaacgctgccagaattcttcctccctgtagcacagcctgaaaagtatcttcagataaaaagccaaggaatcatgagtacgttctgtcttttcttatctacacatttccatcctcattgttgattttctcctgtctagaaaaattatctcatttcccccagtgttctagcagttttctatagggtgaaaagtcttacctttgttactccatatcaaccattggaaattattttctggcttttactttgtaagataagcttgtaatccatttattttttgcagctctttggatgttaggtagtgtttcctaatccctgttgatacatgttaacagtgccttttcatctgctgtttatatcctaagaattttcaagctgacatttcacaccattcagctataaaataacaatgaataaaatatttcagaagtactgtatttttttggcaagtaaagtagcatgtcgattatattaaagctcacgagtctctccaaattatacctttgcaaatgattagggtcatgggttgtagttttaagactatgttgattttaatgccctgttttctggtcattcttcaaagtaacatgtacaggcttaacaactgatacctagttagagctcatcttcagtaaattaaagagtctgggactggtcctataaagctattattgaaaactatatgatttttgcccatagcctctgttttccaaagggaaaaaaattaaaaagcaaaaccctgcatttgatgctacattcttaatttgttttgtaaattttttttattttttgttttgcagattgtcaatatttaaacagagcgcatcatgcgtgagtacaagctagtagtccttggttcaggaggcgtggggaagtctgctctggtaagttagccaccaactataactaatcagtattaactaatacacaggatgtggatagtagcttcttatcatgcttctagtcagtaaggaaaaatgaagcattgttctttataaacctgctatttgtagccaaagaggtatagcgttagactggcaagtttcttacacttttgtatgccagctacttattggccaccaatatttgtgattcaaagtggaatgcgatttttattgtcagaaaaatgtatattccactgggggaaagtgttatggattgtctcagagtagatgctcctttacctgacttgaagcttgcatggaataaaatttactttttgcatatatgaggttccatggcagcctctggggttacaacagcagataaaaagtctctcatggagctcacaatatagcagaaaaatagattgtaataatacacaattaaagagctacttgatgctctgaaagaaaaattcagacttttaaaggagagactggcaagtggcccttagctttgacaactgcaggaaaggccagaatagctaggcatgagtaagtgggagaaagtgaggtggcagggagttgggagctcacatgacttaaagatggctctgtagggtttcttggggtgctgggaagcaggtgagttagccatatatttcatttaataaatggactttaacctctgacatttagaagagtgggagaaagttgggagctagttaagtccactagattgcctgattaggggcatgctagtgaagaagagacatgtagatgcttgaagatgaaatagaggaggtagacctgaaactgattgctcactggggagtggggtggaagagtgaaggaacagaaatgcaaaggctgatataacatactcaagttgctccagtaaaatacatcaaaggggcttgtgatacggtattaatgccatgagtatgtcgatcatatttaatttcatcagaattccattactgttagtctgttaggaatatgaattaacacctttgtggaaatgagttttaaaatgtatgtaatttgggggaggggagaaaagggtctctgtgttagcccgggctggctttgaaattgataatcctcctgcctcagttccccaagtgctagaattgcaaatgtgtaccacaacacaaatgtgtaccacaactttggctttacatataactttcagtccagcaatttttctctggactttttttttaagatttttttttatgaatatgggtgttttgtatgtactgacctgtgatatcaaagatggagcatgtatagggaagaaaggttctagttagtttaccatttatgtttgatttttcaaaaagctgtaggtattagggcttgagagatgacaggacacttaagagaaaacactgttcttgatgagaacttaagttcagttatcagaatcccagctgaccgaccggctcacaacactgaagttcagccccacaggaacctgagccaacttctggcctctgtgggcacacacatattaacataatacatataaataagattgaaatgacttttttaaaaagttagaagtgctgagaagagggacctatgaaatacttggactgttgttgtaaatagattgggtagatggaaacaagggtggtagtaggataaagaaataagttaaattccatcggcgcaaacagaattgtccagggagagaacaggagaatagcccaggactgattctgaataggtgtcaagtgttagaggatggagaggattgaaatccccagcatagaaaaaggtctctggtacttactgtgtttgaatacattgatgtgtctgtttgactgctcagaagtcaagagaggaagcagagcggggcatggaggtggctgcacatcataaagggagcagctttgctctggtgatgttgcttgccacagccatgctgggctgagctgaggagaagaaagcactgtggagacagttagagtctgagtgtgggagcaaacagacaagggggagacactccagggggcacagggtcaagaagagtttcctgtttcgcttggggattgaaggtagtagagaacatttgtatcttagaagcagtgatccagtggaaaagaagatatgacatgagggagaaggaggagcagaactagtatggtgtcaaaggaataaaatgaaaatagagacaaagccgggcgtggtggcgcacgcctttaatcctagcacttgggaggcagaggcaggcggatttctgagttcgaggccagcctggtctacaaagtgagttccaggacagccaggctatacagagaaaccctgtctcgaaaaaaaaaccaaaaaaaaaaaaaaaaaaaaaaaagaaaatagagacaaaagaatgagataatgcttgagaaatgaggagccaagacagaggaataatgaaagcttacttatcataaataagtgttgagggtgagctggttgttgctgtttacaggtgccagtaatgtccagcttgggggcagtgctttgactttcatgcctcctgtaccactgcattgtgacagtggaggacctaggctacatcttagcattgggaccttgtgcacaataagaacaccatatcctggaccatattttgagaccctctcctctaggctgcccttgtttgaaagccatattggtctttttcctatctatgtcataatacaaaatgattaaacccttgataaaaatgaggattaaaagactgcacctgaggagatagtttagtggggaagagctcttgttgtgtacatatgaagaactgcatttaaataaattccccacactcatacctgggtgtgggcatacacacatctgtaactccagcgatgagcgtgtacatgcatgcgtgtatggtgcatgtgtgtgcatgttagttgtatgttgaagaaataaagctagaagtgatagagtaggacatccagtgtcctctagtctgtgcacacatgcatgaacacacacagttttaagacacagtaccatggtagaatgtttgcttaccatgtctggggtcctgggttgtatcctcaaaacagaggaatgaaaagagggagagaatgattaaaaattttactatgattatatattgaagttcctttaagtaatttaagtgtagatgaccttaatttgcatgtttgcctttgttaataggcagggatattccagacacttttaaaattgcctaggttaaatctcagaattattatctgtacttatgaatgataaatgttctttctagtatacattcagatatgttcagtccgtatactgcagatgaaagtacatcattctccctcacctggatggccaaggctctcagttgatttctaaaaccatgggttgtactgaactcatatattcacatatgtacactacttagtcatctttatttttttctggtgttacttagacagcccttgttttctgtgactaggtagtactttccactggaaaaagtaagacttaagaatcagaaagatggggctggagagattgctcagtggttaagagcactggctgcattccagaggtagagttcagttcctggcatgcagattatgtgcagataaagcactcatatacgtaaaataaataagtcttttaaaaaaaagaatcaggctgggcgtggtggcacacacctttaatcccagcattggggggtgggggggtgggaggggagtgggcagaggcaggcggatttctgagttcgaggccagcctggtctagaaagtgagttccaggacagccagggctatccaaagaaaccctgtcttttaaaaaaaaaaaaaaaaaaaaagaatcagaaagatgatgtattgtaagttcagctggcaaatgggaagtatttctggggtacaagtgaaacttaaatgtgattataatctaaaattgaaaattctttggaacctttgtttctttccttttggacaggaaattatatatattttaatgagctatgtaatcttgctgtctgtatccctgtattttaagatgtaatgtaatcatggttaagcagtgtagtagcagtattgacaagtttttaatatgaccatcgctttttgtaataaatgtgttcttagtttatgtgtgctttcttactggatataatactgatgatttacatttgtttttatccagaatttcaacacaattccatttactctttacaatttttaatgtaaaataacacttaagaacatttgatttttctttcaagtctttaactctggtttgtttgttttctcctctcagacagttcagtttgttcaggggatttttgttgaaaaatatgacccaacgatagaagattcctacagaaaggtaaaacgcaaagctgtgtgtgcacgtgggagtaatctttacaactttcaaacttggtcatgggattgcttttttaaatagttttgagaattaatagaaatttgcctgtgctacctggataaaacacgcctcactggacactgcttaagagagcactccatgtgctgctgctgctgtccattctctgctgcatgcattttcccagtgggaagttcaagtaaaaaaatattacaaatgaataataggcatatttttaactactgcttgttaacaaaacctactattatggttgaagttattcattaacttttttttacttagtttgtagaaaatgtaaggatatttacctttagattatcagcaggattcaaaatcagtgcgatggtgcgtggcagcacctgtcacgtttctcaggatctgtggaacatacatttttttaatttagttttagtttggcataagattaaagatgtacttatttgtgtgtgtgtgtttaatgtgatttttttcttaaatttttgtattatttaaatgcattttatacatcaaacatattgataacattgaacattttgagaatcaataattcataaaaatttattcaacttttatatgtatatcctttcataccctaaaaatatcattaatgaatgtttaatactatccccaactgagggtcctatagctaatattgagtactaaattgtttcaaaacatacaaaatattccttgggaattaaacatagtaaatagtgtaaaatattaaaaatgaataatttttaaaaaagatttatttattatatgtaagaacactgtagccgtcttcagacacaccagaagagggcatcagatctcattatagatggttgtgagccaccatgtggttgctgggatttgaactcaggacctccggaagagcagacagtgctcttaaccatctctccagcccttaaaagtgagtcattaagaaatgtactcaaaaacccttatatgataccccctgacatagtgagagagaatttgaaacactttctatatctgtgtacattgtctaacaatcagtttacttaaaaaagattatcaatgtttctaggagagaaagtattttatcagtaagtatatttttaaaatttcaaagtagcaaaaactctttgaagttaaacattaagcaaatgttaatttcaagcacagtgagaaaaattatcaatatttccatgatgtttgtagaacatgattttgatatttccaactattaatattgagcaaacagaatagctattttaaggtatattttgttgttatgtctcccttttcatttctgattttattaatttagatactgtctctgtgccctctggttagtttggctaaggatttatctatcttgttgattttctcaaagaaccagctcctggttttgttgattctttgtatagttctttttgtttctattttgttgatttcagccctgagtttgattattttctgccatcttctcttctttgggtgtatttgcttccttttgttctagagctttcaggtgtgctatcaagctgccagtgtaagctctcttcactttctttttggaggcacttagagctttgagttttcctcttaacactgctttcattgtgttgcataagttttggtacgatgtgtcttcattttcattaaattctaaaaagtctttaattttttttatttcttccttgaccaagttatcattgagtagagtgttgttcagcttccatgtgtatgtgtactttccgttgtttttgttgttatttaacatcagccttagtctggggtgatctgattgaatgtatgggattatttcaatcttgtatctgttgacacctgtttcgtgaccaattatatggtcaattttggagaagataccatgaggtgctgagggaggagaaggtatattcttttgctttaggatgaaatgttctataaataatagatccatttgtttcataacttctgttaatttcactgtgtctctgtttagtttctgtttccatgatctgtccattactgagagttgggtgttgaagtctcccactattattgtgtggggtgcaatgtgtgctgtgagctttagtaaagtttcttttatgatgcccttgcatttggagcatagtggaacatacaatattaaaatcaaatgcaatacaaactttgtgtgtcattgtagcttcattgattatgacaaatttccactctgctgcagggtattgtgataagagagagaaggaagctgtatataatataagcatagacaatgttggaaatctctattttttccctgattttgcagtgatcccaaaattctcttatagaagtgaagttggatcagtcatggtggtacatacatttgatcacagatcctaggaaacagagacagggaaagctctacaaggtcaggggcaacctagtggacaaagacactatattcattcgtggggggaggagaaaggaagcaaggaagaatgaatgaatgaatttaaggaaagactaaaatttatttttaaaagaagcaaaattgttggtcttgacaaaaatatgttctaagactaggtagaactatgaaaagcttttatgatttattttcttaagtgtccagggttaggatagtataataaaatgcaataaaagagccagagttacccccttcttccaaagattaaacctacatctcaccagagaggtgtagctagtctttgctactttgtgggttcttctttctccctcccaccctttattttatgccctcagttttaccccttaacactggataggagaaaaacaaggagaggggagaaaaaaagaaggagggagggagagagagggagagggagggagagagagggagagagagggagagagagggagagagagggagagagagagggagagagagggagagagagatccctaattttaatttctttccttttgtttcttctttgaccacagttcctaacaaactgcaaccagcctccctaaatgaccaataaccaccaataccacagttcccagaattccaaaagtcacacaattgaagaaactaactgcagttggcaaaaccatgcctctgctagagcatgaggcaaattatgatcagctgctatggacagtccaaagcagcctcatatccctgcacctgggattaaaactgaacacccattcttataatatttctgttttttaaagaaaccataattctgtaagtgtgactacagagaggaaaggattgctttgttgggtatctgttctgagaaatggttctttgatagcactgtaatttttgttgaattaagctttttaggatgtactggcaaaacaatctcattctcttccaaattaacacaattgagctctaaatacctatgaaactatgggctgttaactgtttgccccctctgtgtgggtgagagctgtcccccacccccaaggcgctccctctcagcactggcagggaggccagggtcaaagagcctggagggtgatgtatttatttttaggagacagggttgctctactgagatttcttccaaataaattgctagttaagtctctaactataaagcaagagctgtccctaagcatgctgaaggactaattttttcaatcccttctataaaaattttccatagagttgataattgatactttctttaggccagtcttcttttagagactgggaaaatagagttagtatatttatatttcactttctacacaggttttttttcctaaagagccccttaaactcttaagaaatgtctatattcttaaggaataaatagctcattgctatttaacatttctgagtttttgttgcaaattttgggagtattttagcaaaattttaacaacttgtatatagtaaatagcaaacgtttctattccttaaaatcgttttgcatacaatttgacccatttaaggtggttgattgaagccttaccttttgttggaaatagtgtctttcaatgtcatcccatagggccataaagaactcttcctgcctcagcctccccagtactgagaatataggtacgccacagcttgggttctttaattctgttttccatgaagatgtgtgtgtgtgtgtgtgtgtgtgtgtgtgtgtgtgtgagagagagagagagagagagagagagagagagaacttcatcaaaaatatgatcttcatgtttttctgttagactttttttctgttagaactgtatgtaccatttttcttaaatttcttaaaacaaacctggtttttttttttgccctccaataagaacaaatgagcatcattacagcagagaacatccacactcaactctaaccatcttggcctttggaatactgctagtgtgcttgaagacccctgttcttattatggtaccaagtagaaaacactcagtagtcgttataagtgctttgaaagggtaaaggcaaaacacgttgatgttggtttttttttgctctctcacagcaagtcgaggtagattgccaacagtgcatgctggagatcctggacactgcaggaaccgtaaggattcctttcttttcctttaacaggttttagtctgtgaggacagtttcttatctaaataattctctgtgtacagtgatactctgattttttaaattctctaaatgtaatcctttatatattttctttaagaaattgttttgtgatatgcttgatgcccacatattataattaaattgtgtactctattcacctgaagattctaaagggtttttttttggggggggggggtgacagtcttatattgaagtaagatgatatgctatgagtactttttaaaaaaggtatttaagttcagaattttagtttagatagctctcccctgctagtcccactctcctcagccctctagttaactaatggctctagcttctcaagcactgtgcttcctgggccctgtgtatttgttgatctctgcctgggacacgttataagagtacatgataaccctgtcttccctcttgctccctcttgctctcctgttacctataggtgccttcacctttaaaataaaaacttttattccacacctcagctgacagccccaaaaaacagaaaaaaaaattattttttttctgtatttttgcttatctctgtgtatattccttgagaggcttttgtgttgaccagcatatccatcctgctgaaacagttgttgataagtcttgcagaatgtctgaggaaggaggttgggattcttagtaagagccataactgactgtagcagtacagtatttacactgtagatttaataagtagcagagacctaatctcaacagaacatggaagtatactagtgctagagtttctaataaagtctgtaattgaaaaatccagaaaaacaatgtacaaagactaaacttgaaggatgggatgtggatgaatgttagctcagttgacagcttgagtgcagcggccaggctggaatatctagaactattttggatatagtaaacagaatggaggtggtgacagtgggaaatggcaagtcaaagaaacacagtttataaagcttcatgggtctgtatgtttaataataaagaggtcacaaaataatgcattttaatattctgctatatatgccttcttaatactatatacaaagttcaagaactttttagacattctgtattgctatctatgggtataacatataataatgattctccaaagaagagaaagtgacttcaagcaaacagaaaacatttaatctggtatgactgtgaccaagttaatggttagtgactcttaaaaaaatagtcactgtatctagtgcaactgtgactgatgttgacggtcagtgactctgaagagaacagtcactgtcctgttctcaggtcctttctaagaatttgaaattcagggagtaggaaaagaataggaaaaagctcttttcagaagagtctgttctagggttggtaatgtacctatctggtcatttccatcttgaattgtttctacttgagtggtgatcatatgtaaatcttccaaacaaaataaactcaggtttgtaaataaaaggaattgtatcagcaaacatagacatttacctcagtttcttgaaactagcctgaagtcttatgtcaatatgtaatttaaatgtaggtccttatttaagatttttctgtttaaaattattacagcattcattcaaaatgcacttatatttataatttttttaattataggagcaatttacagcaatgagggatttgtatatgaagaatggccaagggtttgcactagtttattcaattacagctcagtctacgtttaatgatttacaagacttgagagaacagattttacgggttaaagacacagaagatgtaagtatttttctctatatagaacatattgctatttctctacagccaaataagaatgtctgctttctcatcagcagaaggtttaaaaggtatgtagcatacgtcaaaaagagcccctgaaaataaatttcagctttcaaaattaacctgttagttatatgttgagatgtttagaaaatgaacacttgtatggcaaagtgacactcgttttgccatgtgaataaaaagaatgaggactcagatacttcatggaagagggaaggtgtgagactcaagctttgaacatgagacattttcaaagagccataagatgagtgttgctgtttctaaaattctttccatacatgttctttggattgctttgctgttttaacacagtatcttgctatataaagtaggctagccttaggtacttaatttttctgtctccaccttctaaatactgggattatagtcatatgctacctttgttggtagcatatgctttttgcttacctttgtaaaaaaaaaatatattgtatatgtttacatcacctggaacttatggggaaattccttttgcattatataaattaagatagaaattttcagttacacattcctggttttgtgtgtgtgtgtgtgtgtgtgtgtgtgtgtgttttctaatgggagcatgtacaacttctcaggaccttaatcttggtaacattgttggtaggaggaataggtgccatatgactccatgactgccttaatgaatagttgtcttccttgctttatccagagagttctgtttcataacacacagatcagtgagttctgaaaatgttaatcccctttactccgtcagtaaaagaagaaagatgcctagactgtttaatgtaacctgttttgggtaaaaggttcatcacatcccgaacgttctttttgtgtgtagtacgttgccttacaaccttctggctttgttctctgaacatttagctgaagaacctaacacagtttgttagctgaatgttttattggaagtaggatgttgtgttaaagacagtcaaacatctgtggtatggagtgacaggaaagacacagctgcttgttgtgtcttccgcttgttaaggggtgtccagggaggctgaaagcggatgttagagtccctggagctggagttacaggtgattgtgagccatctgatgtgaatgttggaaactgaactcaggtcctctagaagagcagcaaatgctcttgaccactgagttgtctcttcaactcctatttttattctttattattaaggaatggagagatggctcagtagttaacacttgctgtcctcccaaaggaccagggttcaatgctcagtacccacatagtagttcacagtcctctgtagctcttttggcctccccgggcaccacacatgaacatggtgcattgcattcatacactacattaagaaaaaatggaatcatattctttataataattggtgtgtgagtccagtaggagttcactatttttggcccctctctctgccttccattctccttctgtcctgagcaaccacaacacacagcacctggaatcacttagtgatatatacagttgcaaactgctgtgttctttttccttcctgcaggttccaatgattttggttggcaataaatgtgacttggaagatgaacgggtagttggcaaagaacaaggccagaatttagcaagacagtggtgtaactgtgcctttttagaatcttctgcaaagtcaaagatcaacgttaatgaggtaacctgcaaccgttggacagtgtaaacaagtgcctttttattttcatagccagaagttttcagaaaaaataaaaatctcaattttaccaccttgtagaaaatagtaatttctagacactgtgttctttggcttccatgacatcattctcttaagagtttcagtgcagacacctaatgttaccttattgtcacaggctgcatataaaatcctgctaaaacttttaagtgatatgccagtgctagcatttgaaacttgacccagcactttttattataagttacttattcagttgaatataaataggtggtaaagtccaatagaacagtaaaaaaaaaattaaaagttgccattataatgagccttcgttataaaataccatcatagaatttgattttgattcttgctcctatttttttcttgctccttttgatgcatgcctaagtgtggtctgtgtgagcaaacgtgtaagtcaaaccactcagtccttcagattgggagtcgggatgcgcgtgtgtctaatttgagcacctcactatttaagatcttaactacggtccagaaggctttgcaaataatcttatgtgcctcattttaaaaaggcaatagttgaccgagcccccaaaaattagttcatttcccaaattgctaacaccaatcaggcacatccatgagagttcttttgcttttggaactttttttttaattgggtattttatttacatttcaaaggttatcccctttcctgggttccctccctcctcaaaacactctatcacaccctccctccccctgcttctatgagggtgttcctccacccacccacccactcccacctccctgcctacaatggctctacaccggggcatagagccttcacaggaccaatgacctctccttccactgatgcatgacaaggccatcctctactacagatgcagctggagccatgtgtactactatgttgtttaccaaaatcatttgcaataaatggtgcagaaaggccgagtaagcctcttttttccttctctggctgatgcacttgccattgtagtgtcgcaggtacctggacacaggtgagaataagagaaggcttgctcatcaaggctggggttgcacttctctggcctctggttctgtaaatcatttttcaggactgtgcttgtagaatattattttaaacatctggtaaggaaaaaaagtcagcttactatatattctgtttcttatcataatcaagaatgctaaagcttgctttttttaggtgaaaccacttttaacaaatacaaaaatcttttaattccacttacctggcaaacacattgagtacctgtagtatgcctggcacttcattctgtacccaagtggcagtcatccagacagaacgatttcagccattaagaggtttacatcctagttgaggaaccagtcctactgagccctgccatacagttatttgttattcactgctaggtcagtgagaagaaattgagagctgtcactcatcctcttttgttatagaattagaatttcctagaggttgtttttaaaatatggctgtaataaaattttaatgtttaatatagtattttttgaaaacatgaatgagcaagaaaaggacccagatatagtggcatgcacttgtcatcccagcagtctggaggtcaaggcaggactgggagttctaggccagcctgcactatatatcacaagacccaactaaagtgagctgagaatactttaatgaagaatacattacagttggtgaatgcccctgggtcgtagagttgtagtgcagtgtcaccttatgaaggatgatttggcctttggaatctggttccttactttgtctgtcaccctcactgctatccaccttccacgttcatcaaatgtgcagagctgagttggaccagagttctatcacacaagacctctccctgtaggagccagagtttagtagggagaaagtaagtattcctcgtcttttatctttacaagattgtgggatcccacacaggctattaaaccccctgggttgcagtttctaatgcagcagaattgacttattcatggtgtcttgttcaagctttacataggggtttaaaaaacaatataaagtgccatagtcatcataatagtctccacttctttgagaaaccacacagactacatgctagaaatgagagtataatttgaggtatttgtttttttaagatctcactcttcatagcctaataattcagctgcaaaattccttgaatagttggtggtttttcagaccactcaaactgctgttctaatgcttgtatggtttctgaatgcatgaagataggggaataataatttcacaagattcagctcttgactttaaatttgcaacagatagggacacagtgcttggccagagccctctaattctctctattctacaagtatcaatcagtgcactggaaatacctcaatcttagccccaaatttcttgttctttgctgaggctagagtaatgattggaataaagacatcccaattaggaatgggagaggggttgagaaactctattctgtgttccctctagatttttctatagttcagagagatgaggacgaacctaggctgggaactttcagcatttctaaccaaatattatagttcgaacttgccctcatcactgaaccacctgctgctgtgaggtaggccatgttttccaaagatgtaatttaaaatgatactgcaaacaatcggttacctgtctctgtgtgccagaagctggaaggtggctggtaggaagaaactgaaataggagctgggtgtgtttcattattttactgttctggtttatctttttgttactttgtatttgtatttgcttgcatgttaagccttgcacaacaatgactcatattcgtaagttctggaaggtttcagagctgtgaaaacagctaccagtttgcttataaatgttgtagtttttaacatttagaaataaaattgtagaaagtgcaatgattttagaaaatgggaattggatggagggaacaaaacaagaatatatttatagcattgtagtgaatctgttcttttttatttccagcagtttagtcttgtaatctctgagccatttgaaaaagtaacagatgattttcatcttaaagaaatgtatagtttgtttctcatctttgataaaatacactgactagaatatagttcagggtggaggatgctcctagcatgtacaggctgtgggtttaattcctcactactgcaaacaacaataagagaaataaatgtaaatcaatgatgttaaaatctcttgcttttgaaatttacttaaaagaacgagaaaaatattgtttattctttatttagattcactaactgttaacattttgccacgtacttatgggaaccacatttctttgctctgatatattttagtgtgtgtatctttggatcaaaggcatgcttgggctggagagatggctttgtggttaaaagcttataaggctttatgaaaggccatgaattcaggtccagcgcccatggctcacaactttctataagtccagatgtggctgatccaacactttgtattccacaggcacccatgcagatagataaatggaaaataaaaaaataaagcacgccgggtatggtggcgcacacctttaatcccagcacttgggagacagaggcaggcggatttctgagttcgaggccagcctggtctacaaagtgagttccaggacagccagggctatacagagaaaccctgtctcaaaaaacaaaaaataaaaaaaaaattactaaaaactgttaaggtcattctctaataaaaccacagtgattaaaatcatttagctaaagatacaacttggctgttgagtgtttgcctacaagagcaaggcatgaattccatccccaacaccgcaaaacaaagcaaataaggaaatttgccttcaacacagttggtttggcatgtgttggaatgttgccagttcaccctgttgtactcttaaagccagttctgcagatcaggcattcagatgagggtgctgagggcctttactttcatcccacgccattactgagtgagtgcctgcattcttagcaaagaaccagatttgttttaaaacattgcgatgcttaacacggtgaaactacatataacagagcagagttaaagtaacctgctttcatgacataggaagtattgtagtttttgtctttgatgtttttcattcttccaaagatgaatcttcatggttatgactatactctttgccacttccaatcagggattagtggattattcctgtctgttgtattgtttgctttgaccatgtaggtgcacacttttaatcccagcactaaggaggtagagcaagtggaccttttaagttcaagaccagccttgtcttaaagtgagtttcaggccagccagggcaacatagtaagaccctaccttaaacaaaaatcaaaaaattcataatgggtggacatcatggacttgatcttgggttacctgaagagagacacacttttacctgtcccagcctaaaatgtacatcatcgtcaaataaagattaagggaaattctatatacatttattagactttatttttagaagtgagaaaacaaaacagaaaaccctgaaagacaaagaccaaagaactattcccagttttgaaggctgaaagcagtgtatgaggtggtgtgcatttgggagatggaggcaggagaatcaggagttcaaggccagcctgagtaatagtacgtttgaatcggcccaggcttgaaatgaggccccacttcaaacagataagcaaataataagacacagacagcaaataataaacagataagcaaataataagacacagatgctacagtatcaaggacagactgcagtatggatcctgatggattctgcccattttaggacctggttatgatatctgacaaaattggagtttacgctcaagatgatacaaagaaatgtcttaaatatcttactgtgattagcttttttttttaaattcattttatatatgtaagtacattgtcaccgttttgagacacaccagaagagggcatcagaacccattacagatggttgtgagccaccacgtggttgctgggaatcgaatccagaatctctggaagagcagttgatgctcttaattgctgagtcatctctccagccctatgaccagcattatgtttaagttaccacaagaatatactcttgttctgggagatatatgtttaaaccctttaaggatccatgtcactataacgtgattcaaaagcaaatgtgtttggagagaaagagaaagaccagtagagtaaaagcagcaaagtgctggtgcctggatctaggaaaatgaggggaaggagggcattgctgttactgcagtcactttggtgctataattttaattctaattttaagtgctcaccacttgattttttaattgactactgactgtctaagagcagctacatatccttaatcgtgaataagtaagtcctgctttactctaagttagcttgggaagctaagaaactagacttcagaagatgacagtgaagcacagatctaatggcagagtaatgcttagttctttcaaaatcattctgtggaacaaacaatcagtatcttttattgttgtttttacctagatattttatgacctggtcagacagataaatagaaaaacaccagtggaaaagaagaagcctaaaaagaaatcatgtttgctgctctagacctgaagtcagcagcagctctgagccaggtaagacacttaagcagaacggaggactctgcatctccctgtctcttattctctgtgtgtctgagcatctatagcttgtacttgtgtgcttgtagagatacctgtgtctgttgagtgatttgtttactccccaggagggtctaagctcagagtgaggaccatgtgtgatttgcttgccaccaggttgaccacacctgccacagagtggctattaagagcatttacccaggttaccattctgtttgctcctctgtgacgttagcatagcatatatatatacatatacatatacatatatatatacacatatacatacacatatacatacacatatacatatatatgtatatatattcagtagtttatttttaattaatttttattttatgaacattgattggtttttttctgcctgtatgtatgtctgtgtaagagtgtcaggtcccctggaattggggttacagatagctgtgagctgccatgtgggtgctgggaattgaagtcctctggaagtgtagccagtgttcttaactgctgaaccacctctccaaccccagcttactttatggaagtagttagtttattatttgactaaggtatttgctgttgaggtacttttgagggattagtaaggataatactgagcctagcctagcagctcagaccttttatcccagacaagagaatgaggtgggaagattagatgttcaaaaccagcctccctttacataagcaaagtcagaccagtcagggctctatgagaccctgacttaaagctaaaacaagcaaactatatgaatagtttgtaactgtgtgcataatttatgcacatgtatgtatgtagaaacataatggccagctcatatgctgtacatatgggttctttaagtgtttataccagagtacatgtaccagcaattccacatcctccccaagattggtattttcaggtttttaaaactgagccattctatctgatgtgtggtggcatatcattgtagatctatttgtcagctcttctcaagagtgaatgactctccaccagacgctttgccagtctgcatcaagtagtagttgacttcaggtagcacttcagctttcattaagagattcatgtcatttgtactgccagtcaggtaagagtatgtgagccagttacatggtttcctttaactacatatttaaatcccctgaagttcctaaacgaaagcaaatgctttcctgggtcagatggatgatgtagtttgaggctaattatgtgactataactaaacttgatggagttagaagaacataaactctcctaacttgagagttggtgacactaactcctgttgacctctggggcctatttagtagattgttactgtctgagctcccaaagagctaatttgtactcctagagatggggtgaataactttctttcttagagaaaacagttgagtaactgcaaccctttttaaaggaaaaatagaaaggaggaagagcatggagattgtcttaggtggtcaaattcagaaggtcagctcccacctaaacggctgaggttcctgaagagctaagtggctttttactgaaacagattgatgaaaatattttaaatcattagtttcctgaaaatgattcttgttaagatttctgggatgtgtatgtgtgtttaaggaagggacaaaagacaaagacaaaaatgaggacttgagttggtaatgtcttgttttactcttctagagttgaatagcttattggcaacattaccttggcaaacaggagttttttttactttgcattctcagaaaatgttctcttagtttatattaaagggaaaggtatcatttggactattgtgattttaaaattcattcatgcataaagttttcctgagagaaaagaaatcttgcctaagtctggaaataagccattcatattagttgtctcaatcttaagattgtacataattcaatttaaatgtagtttcctgagatccttataggtgtgtgatagtgcccaataatagaggccttagcaaccaaaatgctttgcagtacattttgttgtgatttgtaattaaaatgctaagtttagtgtggtggcgcatgtctgtagtcccatctcatcaggctaaggcagaagggttacctgagcccaggaatctgagaacatcctggccaatatggcaagactagggctgaaaagttctaagataacagaggttagatttaaataacaattataatattttagtaagagtatttgaatgtcgaaggcagcttatgtagctaaagcctttaagtagaattgtattaaaacatgtaaatttcttaaatgacccaattttaaggatctcagagaaatttatcatcaggagtttgccctctaaactaattggcttctgctgagtagtggggcctgctgattcttctgccttcggatctgggctctttctgtgctgtgtcttaccggctgggttataagtaatagttcttaatatggtatcagaaaatggctgaatttcccacagagtgtgtatgtagacaaatgttgacttttaaaaataaggtaatgggatataagcaaaatactactgtttgcctctttatatagggtgttagataaaatgtgaaatactgagtgtaataaaagcagggcagacaaaaattgactactaactgactactaattctgtcttttatatttgactttgaacttttgggacagtctgtgtacttcaaactgtaatcaaggtcagacttaaactcctgaccctcatgccactatgcccagcttatgtttgagcatgtttaatgggaaagtcagatagctcttctactgaagtagcttaatggacttcagttccttaggaatgaatgttcagtgctgtcatccctcctgtcattagatagctctttattgatattgatattgatattgatattgatattgatattgagagaaccctagctctatgtgtctgtgtctcttcaatgttccagattacagaaatgaagaactgttgcctaattggaaagtgccagcattccagacttcaaaaacgaaatctgaagaggcttctcctgttttatatattatgtgaagaatttagatcttatattggtttgcacaagttccctggagacaaagttgctctgtgtatatctcttggaaataagacatagtatttctcctttgcaatagcagttataacagatgtgaaataagatacttgactctaatacaattatacagaagagcatggatgcatttcaaatgttagatgtactactataatcaaatgatttcatattgacgtttttatcatgactcctccctgtcaagcactaaaaaattgaaccatcatactttatatctgtaatgatatagattatgaaatctcctctcaaactcattgcagcagataacttttttgagtcattgacttcattttatatttaaaattatgaaaatatcatctgtcattatattctaattaaaattgtttgtgcataatgctttggaaaaatgggtcttttatagggaaaaactgggataactgatttctatggctttcaaagctagaatatataatatactaaaccaactctaatattgcttcttgtgttttactgtcagattaaattacagcttttatggatgattaaattttagtacattttcatttggtttgtgtctttttgttattgtttattgacatagtcctttattttataatgaccacattgtttagagtgcagcagtagctcttcctttctgcctggattcagcagaacacttggctttaaactaccctaactggtgatctctctaggaacagacctcgcactcctgctctagatagagttattcctactatacagtaagatgcaccatgtgacatagaatagttttatatatactctcttgaccttaaagattgtatcatattgaataaagtatcccactctgtattatttttatatgtaaaaagataagttcaatactgtattaccagggtttgactttgactatcgcaaatcctacatacacagtttgtaacttcatccagggaatccttgccattgttaatttgttggtgtgtgtccaccaatgaagtgttaaatgaaaattttcaaacttgctctctagtagatggaagaacttgagggaagtggttgcaagtcagaacacaaaaagggacgtgtgacttgactgtatgagcagtgtagaggaatgctgtgaagatggatacagcagcttgctggctgtacagaggtgcttttcttttccttcccagttgcattttacaaaggtggggcatatgtaggacatggagccagggcgatactgctgtatgttctccatgaagaaagagaaagcaaatggcctgttggccaggtgcatacaggagaagaaagcagattgcaagcttaggaaaccctgtgccttgtccctgaaaatcaaggagaccagtcctagaaagtaaatctttgctcagggatctagatatggtctcattgcaactaggtgtgaaggtgttcatgccttgctgagatatgccaggtgtgtggacagccctttagttaccaagtcagctttcaaatgtaagatccaaccaacctgaagaaatgtcaaaaagtactgtttgaaacattggaaattgtattcttttgatattctaataaacttagctacttaacatttcccttctctttatccagttatacatgtctgtgactaagaggcaaaaccttaagctaaactaaaatgcaagtagaaggatagggtccatttgtcccagaaagaggagctgggctctttgattgtggttgtcttttaagggaggtcttgttataccactcaggctggcttcaaacttctgggttcaggtgaatctcctgcctcagtgtctcaagtagctaggattacaggaatatatcactgtgtgaccaattagggacataccatattttaaggacttctgaagtcattatgctttgaaatacttctcacacatttctttggacttaaaaatcatggacagacagacctctcacaaaccagctaaaatatctaaatacgttatatcacgtgggttgtgtagatatttgttaaattaaaatagtctcaccagtaacacagactgattttatcagtttcctttgacacatcttacactcctcccttgggttaaaggtaaaacaaaaacaaaaacaaaaaaaaaaacaaaaaaacacccttttgacattgaaggatattcaagccagagggatgcagtgttatccaagggaaatttgtacttgctgagcaacatgtaaaggtgtcctgttaagagagagggctatatttttatagtgtctttatgtgaactccttggtcttgggaagggcaactgaaggcaagatgtattttcatagccaagacatggagagtttctagggtattaatttgaatctcatgatgcatatctatgaacaaattacgtagtagtgtttatggctatttcaagtataatagctttgattttgtgaataacaatttaatttaaaggaagcttgatgctacaattggtaggtttttaattttcccaactagaccacaagcaactttaatgacttgatgcctccaatctaattttataattaacagtaaatgcaagtgcatcaccttaccctccaccagggggagcttcggtatcatatgatgcttctaccagcatttccttacaaagactcatggagtttacaacttaattaggcaaaaaatagacacaaaattttgggaaggtatgaataccattaacttaatgcactgtagccactttagtatgtatttttcttaatgtttggagaaacagtggctgctagcatgtgactgccatctccccacagctctgaactcaccttggtctgccatcctcatctgccatcatcagagaactccttttactcctcaataagaccgtctccttttccgaagttgtgatgttcttttttgtctacttgactaaaacaagtgatttggagtcatttttctctccttaagaatcgtaataaaacattctgcatgccttgagtccagtcactttaaaatagctaccctgtgtaccctcacaggtcaacaaatgtttgtcagtcatatgtctgagttttggttagggaccaagggtcagaaagagaaacagtgagtactgtattcctttcctgaccgatactcttaggatgttagtcaacaacatgtctcttataaattatgtgttgaaattagcttgtgaagaagctctctcataatttagaggaggaaaattacacttttatttgggtctttgcttatttacggtgctaaatatagagtgaagtggccccacaaccatccacaccaagcatcaaaagacactttggtttgctcatccagactctggaaagagcaaatgaatgtgagcagtgagcgtgtctgcctacccagctagtagcattaatgctactcagtataaacagatgttcttacagatacagtgtggcacttaggttggtcttgggtttctcttcctgaagttttgccttgaatctattgactgtgcagtcctcttaactttatcatgtttaaatgttcttgtaagaacagctagagactttgaactgactgcctagttcttttttgggaaggcaacatggatcctgttttccagatattaacagccttcaaaggaaacttgagagttgcaagtgctttgggcttgttaagaagcagacaactatagctctaggcccaactgctaattgcttgagcaagagactggctgttcccataaaagaaaatttttaataaaccttcccatttaaacagttgtgtggctcttacattgaactgatgttttcagtaattttctttaatcttacctatgttcaaatttttacactacagttggagtgcatacaaagcagaaaaacatgatcttttttttagatatttatttttatttgatgtgcattggtgttttgcccccatgtatgtttgaaggtgctagaattggaggggcagacagtgagttgtgagttgtagtgtgggtgctgagaattgaactcaggacctctggaagagcaaccagagctcttaactgctgagccatctcttcagcccccgtacatgatctttatatgcctatcaacagttactatatttgtactgtctgaattcatggtatacaacaacatacgccagttcctccacgtgtagacttttaatctttaggaaatggccaaagattgtgctggggaattgagtgagagagtacccccaagtgctttctgtgcaaacatagggacttgagttcagatttctagcactcacacacacatataaaaggtaaggcctagtgataactgtaatcccaacactgggaagtgaagacagatgtgcccaggaactcactgtccattaagtctagccagacagtgagctccaggttcaatgagagaccctgtcttaatgcaaagtagagagcaatagatgtagacactcaacattgacctcgggcctacaaaagcatatgcaaggtacatgcacttacacatttgaatatggtacacacaccacacatacagatagatgaaactgctgaaaaccccatgtgtttattacagtgaatgctgtaaaacttgtacagagggcaacaggaatgagggtggaagatgtatatgtccttgtgttggttatatgagcaaggactgaaaatgtgagcccatgcaactgcattggagaaagaaaggccttccttcacattgggaaaggttatgacgaggtcaccgtggctggaggagagtgaacacgagtaagaatactgtagataatagaattaggtaggctgaatgtagacagggaaaatcagtattagtctgtgtggtattcatgggaagaattttacaaaaggtacaacatagaatcaataatatgtcatcaaaaccacagttgtgggctggggggatggctcagtacataagagcacttgttgctctcgaagaagtcccagaacccaaaatggcagctcacagccatctaactctaggtcctggggtactgacccttttctggtttcatgggcactgcactgcacatatgtggtgaacatatatatacataaagataaaacactaatatatatgcagcatttattctttatgaacatctgctcctgacatcttggttctcaaagatgtcagagaagattaaggagaataagctcttgcccttagttctgtgttagctgacatgattgtcctcctcaggttagcacaggcaggacactctgtaactgctaactctccctctctgcccttacactacaggtgaggcagcaacccctctggctgtctagggttgcgctgaatcagtttttagtcatgtcaagtaggtactagcttcttcattaacatcccattgccatgcccttccttgtgggtgggaaatccacgggccacagctattaatgcaattcctggccaacttgcctaagcatcactgagatcttcctctccagctggatgggctatagtttgaagggacatctgttaagggagtgctagccattcagccttcccaatttgaaaagtaggacttggagccgtggaggtggggcctgcctggcccttgtgcactgtgcagagctaaaagaatcgtgaagacactatttgatcctatactcccatcagagtcctaaggcctgtaccaagagctctggagttctttggacccctgaaaccagtgttgaaaaactaaccagtttctggaatcagagtttactaatttgatgcttgcaacctcaagagagagtctgaacaatcgcttcactcagtttagcctaaggctctgtggtgatgaccaaggtccttggaccagtggtggatctgacttgaacatgaacatggtctgaggtggccagggagctggtacacaggggttctgatgcttttctttcttcatttggaagaaattttgttgcttttttatccccaaagtacttgataacaggcctatggagaaggtggcaccgtggcagtgagggtctagtgtaagtaagccagcccagtgagtcaatcccagcactcgtgcacacacacacacgcacacacacactccatctgtgtaagtttctgatgaccacccctctccctcaacttccagacaagtgcctgtgtaccttttgcctttctggcaagcagggcctggtggggagacaatgcctggagtgtagccagaggtgggactggaggtagagaaggcactcaccacccaactctcaatttccttccccgctacactgctcacccacccctcccttaatagtcacactaaggggaggaggatctagcaggcttggtgttctggaacatcagagcatgacaatttagggaacatcctggggtaggaaggtctggggccagatattgatataaaaaaaagcgtgtccacgaaggtgatccaggtcaggaagagtggaggaaagaggctaggcaagaaggggacttcttcagtaactactgagagaaaagtagctaatcacctgaaaggcctgagctgcccaatgacaacagaaggtgaggtcgattccacagccagccagaattaaaagccaagcagtggaccagggacagttctgtacaacagcttgacgaggggcctgtatactgtttcctgctctgacaataactggtcatggctcccctcttttctggggactagacttcggtgttgtgaaatgcaggggcaggggtcgactaagaaaggcttggccactggctgttcctaaacaggataaactaaaggtgggctcagctcagagctccctgggaggtggagatcacacaggcagcagccctgtgctcagtactggaggcagaaagactgagtactcactagcttggaggtggtcacaggtctggaggagaagtgagagtatgtgcagaagcagaagtgactcaccaacccaagtaagtactgggggttaagtcaaggcacagatgagacctacgggagggctctcaagctggggaaataaaaggcagtcagagcagaactgaacttgttgggacagcacaggcagacccaaaacttggaacagcttgaggtactttggtgggtaaagtgagtgaaatgccagaaacaaggtcagtcaggccagttgggagtctacttgagctctctgacacttgggacagacaggaagacagaatcaagacagatcccacacacaactggtacccttacaaagccccaactttggatgaggacatcttcccccctttgaactggcagcaattccagatgggtgcccaaactaccctgcctggccagaagaggggagacacagtgttggaaggagttaaaaaaatgaacagaagtacagaacactgactcctgttgtccctgcatagggtagagtccagtcagggatcctgcttgaggagatgcagagaaaaggaaaacttaagattgtcaagatcccctgtgagagctatggggcacactgattggaggcctctgaccagcacagggatgctttcagggaaccgtagggctggtgaggagagaggacaccagtgggagactggaatgtaagaatgagaacttcgttgcagggacaaagatgacttggtgatggctgcgtgggtgtgcttggaggaggtgagtggaagggaagggtcacccgaagggcagagagtcttgtcaagttcaggcttcatggggaaaaggattaatcttagggagccccgcccccctccagggtagctagagaaaaggagtgctgtggccaagaaggtgaaacagctggtcatagaatttggctcattcatttccatccctggcctgcaattgaggctccaagctgtcagggacaattgagtccataagactttgggtgtatccttaggggaggggaaggtcctgaggcagtgggagctccaagtacctccctagcctggcccagactatccttccccatttgacaacatttaacatcccaggtaagccataactgcagtggacaagactacatttacgtccttgccacaatcctgtgataaaatgagagttgctgtgtacttttcagcagaccaccagggctcaaagtaaagcactgtttattctcagctttgtccatggttaggcaggagacccgaggatagtgccatttctgtggaatttgtgtgttgggattagcgttctccaccactggtgtgttgtgctgtgtgcctgacagcattcctgcttcacacaagagcagaggagcttccagcaggtcaggccacatgctcaggttcacacagtgaaaagcctaggtcttgattcctgtctattcaactccagatcaggaattcatagaaatactggtgctggccaaaacacctaagtatcttggtcgggaagatcacccaaagtgaatggacacttctgcagggaagctgcagacaggccccagttccacagacaggctggactcatgattttatcctgcagagaatgttagggtaacttgagaaagaaagtgccctcttctatggagattctgggaacaggtgagccaggtagtaggtggagctgagccaagtgtctgttcctcgggattagtttgggttagagatcaccctgagggtaggctacagaagagcatagaggagagaagaaagaggaaacagagatctggccgcctctaccaaccgtgcccagcagggagaggcacttccagtagatactgtggttggaaaatatctacaggctgaccacagacagggatgcagagaggcaggtagatctccgagaagatacctaggccaactagaggcctgccaaggaattaggccagctgtggggcaggcctctatgccaggaagggtattaaatgagcttccagcttatttacttgtcctaattaaccataaaatgagcccaaggggcagaatttagctgtcaatttctctctgcctattatcaccatctcttcccatgactgccagagcatttctatgcacctcttcacttcagtgacacactctccattactgtctcagcaagagccaaggatatggacaggaaagtaaaagttatatgaggttgagtcaccataagctttcatcaaccaagcatgacctagtagttgggacattatatcagccactctgagacccaggcaaaattcctccaaagggtaattagcatgccacttgtcaatcatgaagagacatgaataatctcagaagacaaatgttattcttgatctggctgtggagcaaatgtagacagtttgccaggtagcatgaatgtaagattggaagtcaattacaaactgattcaatcccagctttgtactgtgtgaccttgaaagagttaacttctctgagcctatttgggtaaaatgagcaaccatttcccaggtgtagaaagagaaggaaggaaggaaggaaggaaggaaggaaggaaggaaggaaggaaggaaggaaggaaggaaataagaaaaataaaggcaaaggtgcctgacacatatgtattatcttagatgcacaaattacttcctagttgttttgtattggtcccctgactctgttcactgcatttctttgtgtgccttggtagatgtggaggccagcagctggttcctttcctatcattgagttctcaccttctattacagtgcccagacaagcaaggagtctgtcatgttagttgatttaatggctgtaaaagtggctgctggggtttgaacttgggacctttggaaccacagtcagtactcttaaccactgagccatggttccagcacatgttagttgatttaaatgatgtgaactatgactggtccacaagccaagagagttgtccatggatggtgaggaggtgacctggcttcctatgccatcgaagtccatgtcctcttggatcatctgttgagtgtgccacccttcaggagtcagggtgtggggttttcacatggtccttcttcacacacatcacagcggccatcagagggagctaccgttatcttccttcaccagagacagaagttcaacggagacaggatggacaaggacatgcttgaccagaaagagtgagctcagctgacaaacaccaggccaaagtagataagcctgatgcccacagatttgagctgggaactgctttcctttttgagcagcttgatgggggcaacgtgcatgccaggaccctttgaccccattgattaatcgttctgagataggtacattgcctagcaaaaagctacagatttttttaaaaaatccccactctaaaaataaataaataaagccatctctcatttaacttgatgggaacttgtgggcaacccttcccaatcttactgttacctccccatccctgtcccctaagctctcccttcctcctctcagtcccttgggagtctagactgcaggcagaagagcttctcttgttatttttcttctccaatttgctcttaatgctctgggggcagcaggcggcttgcctctaattgcagttgtcacaccccatcaagctgagctaggtctgccggagggggtgagggaggagctaaggcaccctccgggatagctgggcttgaacaggggcctactttgttctctcctggctaaggggtgggggctgagatggattccttatggacccaggcttgcatgcctgctcactatataaagtgcctggcatcaaccccaccctgcgggtcccctgttgacttccaggttgatgaggatagatgtgtccagctcaccgcatgactatgagatgtagactaagaatttttctaaatatatgggtattatttctaggttcaccccaaccatctgctgccctgcaggagcattatggcaggcaacaggggtcaggatgggctctcactgctggaccaggccgtgtgtgactctagggtccatttataaccatgagatcggcctgccctgttttgtc

SEQ ID NO: 818 - DNA, 1506 bp, Mus musculus
ggcgccgccgccgccgctcccgaggccgctgctcctgccgccgccgtgcagagcccgagcccgagccgcggccgagaggagggaggaggaggaggtggaggaggcgccgggccgcgggattgtcaatatttaaacagagcgcatcatgcgtgagtacaagctagtagtccttggttcaggaggcgtggggaagtctgctctgacagttcagtttgttcaggggatttttgttgaaaaatatgacccaacgatagaagattcctacagaaaggttccaatgattttggttggcaataaatgtgacttggaagatgaacgggtagttggcaaagaacaaggccagaatttagcaagacagtggtgtaactgtgcctttttagaatcttctgcaaagtcaaagatcaacgttaatgagatattttatgacctggtcagacagataaatagaaaaacaccagtggaaaagaagaagcctaaaaagaaatcatgtttgctgctctagacctgaagtcagcagcagctctgagccagattacagaaatgaagaactgttgcctaattggaaagtgccagcattccagacttcaaaaacgaaatctgaagaggcttctcctgttttatatattatgtgaagaatttagatcttatattggtttgcacaagttccctggagacaaagttgctctgtgtatatctcttggaaataagacatagtatttctcctttgcaatagcagttataacagatgtgaaataagatacttgactctaatacaattatacagaagagcatggatgcatttcaaatgttagatgtactactataatcaaatgatttcatattgacgtttttatcatgactcctccctgtcaagcactaaaaaattgaaccatcatactttatatctgtaatgatatagattatgaaatctcctctcaaactcattgcagcagataacttttttgagtcattgacttcattttatatttaaaattatgaaaatatcatctgtcattatattctaattaaaattgtttgtgcataatgctttggaaaaatgggtcttttatagggaaaaactgggataactgatttctatggctttcaaagctagaatatataatatactaaaccaactctaatattgcttcttgtgttttactgtcagattaaattacagcttttatggatgattaaattttagtacattttcatttggtttgtgtctttttgttattgtttattgacatagtcctttattttataatgaccacattgtttagagtgcagcagtagctcttcctttctgcctggattcagcagaacacttggctttaaactaccctaactggtgatctctctaggaacagacctcgcactcctgctctagatagagttattcctactatacagtaagatgcaccatgtgacatagaatagttttatatatactctcttgaccttaaagattgtatcatattgaataaagtatcccactctgtatta

SEQ ID NO: 819 - protein, 122 aa, Mus musculus
TERIMREYKLVVLGSGGVGKSALTVQFVQGIFVEKYDPTIEDSYRKVPMILVGNKCDLEDERVVGKEQGQNLARQWCNCAFLESSAKSKINVNEIFYDLVRQINRKTPVEKKKPKKKSCLLL

SEQ ID NO: 820 - DNA, 41787 bp, Homo sapiens
aattggatggaaaatgagtttgatgaattcacagaagtaggcttcagaaggtggataataacaaactcttccaagctaaagtgcatgttctaacccaatgcaaggaagctaagaaccttgataaaaggttgcaggaactgctaactagaataaccagtttagagaagaacataaatgacctgatggagctgaaaaacatagcacgagaactttgtgaagcatacacaagtatcaatagctgaattgatcaagtggaagaaaggatatcagagattgaagatcaacttaatgaattaaagcgtgaagacaagattagagaaaatagaatgaaaaggaatgtacaaagcccccaagaaatgtgggattatgtgaaaagaccaaacctacgattgattggtatacctgaaagtgacggggagaatggaaccaagttggaaaatgctccaggatattatccagaacttccccaacctagcaagacagaccaacattcaaattcaggaaatacagagaacatcactaagatactcctcaagaagagcaaccctaaaacacataatcgtcagattcaccaaggttgaaacgaaggaaaaaacgttaaggccagccatagagaaagatcacgttacccacaaagggaagcctatcagaataacagtggatctctcagcagaaaccctacaagccagaagagagtgggggccagtattcagcattcttaaaacataattttcaacccagaatttcatatccagccaaactaagcttcataagcgagggagaaataaaatcctttacagacaagcaaatgctgagggattttgtcaccaccaggcctgccttacaagaggccctgaaggaagcactaaatatggaaaggaaaaaccggtaccagccactgcaaaaaccataccaaaatatgaagaccaatgaagctatgaagaaactgcatcaactaatgtgcaaaataaccagatcaaattcacacataacaatattaaccttaagtgtaaattggctaaatgccccaattaaaaaacacagactggcaaattggataaagagtcaagacccatcagtgtgctgtattcaggagacccatctcatgtgcaaagacacacataggcccaaaataaagggatggaggaatatttaccaagcaaatggaaagccaaaaaaaaaaaaaagcgggggttgcaatcctagtctctgataaaacagactttaaaccaacaaagattaaaaaaagacagtggcattacataatgataaagggatcaatgcaatgagagctaactatcctaaatatatatggacccaatacaggagtacccagattcataaagcaagttcttagagacctgcaaagagacttagacttccacacaatcatagtgggagactttaacacaccactgtcaatattagatcaacgagacagaaaattggcaaggatattctgaacttgaacccagctctggaccaagcggacctaatagacatctacagaaccgtccaccccaaatcaacagaatatacattcttctcagcaccacataacacttattctaaaattgaccacataattggaagtaaaatactcctcagcatatgtaaaggaacggaaataataagtctctcagaccacagtgcaatcaaattagaactcaggattaagaaactcactcaaaactgcacaactacatggaaactgaacaacctgctcctgaatgactactgggtagataacaaaattaaggcagaaataaataagttctttgaaatcaatgagaacaaagacacaacgtaccagaatctctgggacacagctaaagcagtgttttgagggaaatttatagcactacatgcccagaggagaaagcaggaaagatctaatatcaacaccctagcatcacaattaaaagaactagagaagcaagagcaaacaaattcaaaagctagcagaagacaagaaataactaagatcagagcagaactgaaggagatagagacacaaaaaaaaccttcaaaaaatcaatgaatccaggagctggtttttttaaaagattaacaaaatagaccactagccagactaataaagaaggaaagagaagaatcaaatagatgcaataaaaagtgataaaggggatatcaccactgatcccacagtaatacaaactaccaccagagaatataaacacctctatgcaaataaactagaaaagctagaagaaatggataaattcctggatacatataccctcccaagactaaaccacaaagaagtcaactccttgaatagaccaataacaagttctgaaattgaggcagtaaataatagcctaccaaccaaaaaaagtccaggaccagacagattcacagccgaattctaccagaggtacaaagaggagctggtaccattccttctgaaactattccaaacaacagaagaagagcgactgctccctaactcattttatgaggccagtgtcatcctgatacccaaacctggcagagacacaacaaaaaaggaaaatttcaggccaatatccctgatgaccatcgatgcaaaaatcctcaataaaatactggcaaactgaatccagcaacgcatcaaaaaccttatccactgcgatcaagttggctttatccctggggtgcaaagttggttcaacatatgcaaatcaataaatataatccatcacataaacagaaccaatgacaaaaaacacaagattatctcaatagatgtggaaaaggcctttgataaaatccaacaccccttcatgctaaaaactctcaataaactaggtactgatggaacatatcccaaaataataagagctatttatgacacacccacagccagtatcatactgaatggacaaaagctggaagcattccctttgaaaattggcacaagacaaggtgccctctcaccacatagtattggaagttctggccaaggcagtcaggcaagaaaaagaaataaagggtattcaaacaggaagagaggaagtcaaattgtctctgcagatgacataattatatatttagaaaaccccatcgtctcagcccaaaaactccttaagctgataagcaacttcagcgaagtctcaggatacaaaatcaatgtgcaaaaatcacaaacattcctatacactaataatagccaaatcatgagtgaactcccattcacaattgctaccaagagaataaaatacctagtaatgcaacatacaagggatgtgaaggacctcttcaaggagaactacaaaccgctgcacaaggaaataagagaggacacaaacaaatggaaaaacattccatgctcatggataggaagaatcaatatcgtgaaaatggtcatactgcccaaggtaatttatagattcagtgctctccccataaagctaccattgagtttcttcacagaattagaaaaaaaactacttcaaatttcatatggaaccaaaaaacagcccatatagccaagatggtgctaagcaaaaagaacaaagctggaggtatcacactaccggacttcaaactatactataaggctgcagcaaccaaaacagcatggtactggtaccaaaacagatacatagaccaatggaacagaacagaggcctcagaaataacaccacatatctacaaccatctgatctttgatgaacctaacaaaaacaagcaatggggaaaggattccttatttaataaatggtgttgggaaaactggttcagaaaactgaaactggactcattccttacacctcatataaaaattaagtcaagatggattaaagacttaaacataagccctaaaaccataaaaacccgagaagataacctaggcgataccattcaggacataggcatgggcaaagtcttcatggctaaaacaccaaaagcaatggcaacgaaagccaaaatgccacaaatgggatctaattaaaccaaagagcttctgcacagcaaaagaaactatcagcagagcgaacaggcaacctacagaatgggagaaaatttttgcaatctatccatctgacaaagggctaatatccagaatctacaaggaacttaaacaaatttacaaaaaaaaaacaacctcatcaaaaaataggcgaaagacatgaacagacacttctcaaaagaagacatttatgcagccaacaaacatatgaaaaaaagctgatcatcactggtcgttagagaaatgcaaatcaaaaccacaatgagataccatctcacgccagttagaatagcgatcattaaaaagtcaggaaacaacatatgttggagaggatatggagaaacaggaatgcttttacactgttggtaggagtgtaaattagttcaacctttgtggaagacagtgtggtgattcctcaaggatctagaaccagaaataccatttaacccagcaatcccattactgggtatatacccaaaggattagaaatcattctactataaagacacatgcacacatatgtttattgcagcattattcacaatagcagagacttggaaccaaccccaaatgcccatcaatgatagactggataaagaaaatgtggcatatatacacatggaatactatgcagccatgaaagagaatgagttcatgtcctttgcagggacatggatgaagttggaaaccatcattctcagcaaactaacacaggaacagaaaaccaaacaccacatgttctcactcataagtgggagttgaatagtgagaacacatggacatagggaggagaaggtcacacgccggggcctgtcggggggtggggggcaaggggagggatagcattaggagaaatacctaatgtagatgacaggttgatgggtgcagcaaaccaccatggcacatgtataccaatgtaacaaaccacgttctgcacatgtattccagaatttaaagtataataaagtgattattgatactgttggaaaaaaaagaatgtaaaagtgttggctaggcatggtggttcacacctataattccaacactttgggaggccgaggcgtcttgagccttacttaatggcctctttcattatgttgcgcaggctagtctcaaatgattcaaattcccaaaagtgagaatcacttgtgcccaggagtttgagactagcctgggcaacataatgagaccccatctctgcaaaagagaaaaaaaaagaaaaagaaaaagaaaattacccagttgtggtggtgcatgtctgtagtcccagctactcaggaggctgaggcggaaggatgacttgagcaagggaggtggagactgcagtgagttgtgattgtgccactgcactccagcctgagcaacagagtgagaccctatctcaaaaaaaaaaaaaaaaaaaaaaaaagttagtttataaagaagacctggaaccaaaaagtttgagaactggactaaagtaacctaaaatggtaactgtttaaagtaggtagggattcttaatccagggttcccaatactcttatagaaagaaaaaatatttttatatctatatatcttttttttttcactaacctctgaatgaaattcagtgtttctattttgaatgcaggcaacaaaacacagcagtaatattagcagcaactgtgactttgttgccaatagatgttttttcctatatccatatttaaagattgtttcttgaagcaacatatagttaggtcttgcttttttatattgcctttgaattggaatgtttagacaatttgcatttaaggtaatgatgtgatttcctttcaattctaccatcttgccttttgccttgtatttgtcccatttttttctttgcttttttttgcttatttgtttgcatttttcatactttctttttgattgagttgaatttttttttttttttttgacatggagtctcgctctgttgcccagggtggagtgcagtggcataatcttggctcactgcaacctctgtctcctgggtttaagcaattctcctgcctcagcctcccaagtagctgggattacaggcgcctgccaccatgcccagctaatttttatatttttagtagagatgggattttgccatgttggccatgctggtctccgactcctgacctcaggtgatccacccacctcagcctcacaaagtgctgggattataggcgtgagccaccacccctagcctgagttgaattttgtttgttttttagtggttgctctgggacttacaatatacttctttaacatatgagaatttactttcaaaacatactatattacttcatatataatctaaggaccttaagtattctatttctctctcttctactattgtaatatattttacttctacatgtaaaccctgtgattgttaccatttttgatttaagtggtgaaattacttttgtggctgggtgtgctggctcatgcctgtaatcccagcactttgggaggccaaggtgggaggagcctttgagcccaggagtttgagaccagcctaggtaacatagtgagactctgtgtctacaaaaaaaattagaaacattagccaagtgtggtggtgcactcctgtagtgccagctgctcaggaggctgaggtgggaggattgcgtgagcctaggagcttgggatcttgggtgagctatgatcacaccgctgtattccttgtactccagcctgggcaacagagtgagaccctgtctcaaaaaaaaaaaaaaaaaaaaaaagacttgttcacgatttaaatgtatgctggtgaactttttgcctccagcttttttttttttttttcctgcccccaccaggaggataaggtctgggaaaaatcttttactttcatttcttcaacatatattcattgtatttatcgttgtaggttgaccagttttttctttgttttatagatgttctattttcttgtcttgcatagcttcacaagaagtctgtgtgtgtgtgtgtgtgtgtgtgtgtgtgtgtgtatatatattttttttctttctttcttttttttttttttgagacggagtcttgctctgttgcccaggctgcagtgctgtggtgcaatctcggctcactgtaagcactgcctcccaggttcaagcgattctcctgcttccgcctcccaagtagctgagacgacaggctcacaccaccacgcccagctaattttttgtactttagtagagacggggtttcgccgtgttgcccaggctggttgcgaactcctgagctcaggcaatttgcccaccttggcctccgaaagtgctgggattacagacgtgagccaccgtgcctggccaaagtctgtatattttaactttgtttctatctaaattttttccctctggcttcttgtaagattttctggttttgacagcttttcaggaatttgattattgtgcctcgttgtggttttctttgtgtttatactccttcaggaggggggctcattgagttacttggatgtgtagatgggtttttgtttttgtttttttttttttgttttttttttgtttttggtttttgagacagggtctcactctatcgcccaggcaggagtgcagtgggacaatcacagatcactgcaacctctgccttccgagctcaaggggttctcctacctcagcctcccaagtagctgggaccataggcacatgccaccacgctcagctaattttttgtatttttggtagagatgaagtttcaccatattatccaggctggtctctaattcctggcctcaagtgatctgcccatcttggcctcccaaagtgctgggattacaggcataagctactgcacctggccagatatatcagttttatcaaatttcgaaaatgtcattatttcttcaaatgcactgctccccattccagttacatatatattatactgcttgatagcttggtattgtcctgtagttctagtcttttttttttctttttcttttctttcttattacacccctaacccttctacccttgcttctttcttccctctctcctgtctccctttccccttctcttctttcctcttattctcatcacatttgaactttgtttaaatttgtgtattttctgttgctgtgtcttcagatcccctgaactttccttctgcagtatttaatatattgttaataccctccagtgatatttctatttcacatactgtttttgaatactgtaagttcttcttggttcttattattatgtgtgccattttcttcctcatttttttctttaaatttttgagcgtatttataatagccgttttagagtcctcattggctaatttcatcatctcgtttctgggatggtttcagctgatttatttcactctggtttcaggtccctttttttttgagacgcagtctcgctctgtcgcccaggctggagtgcagtggcgcgatctcagctcactgcaagctccgtctcccgggttcacaccgttctcctgcctcagcctcccaagtagctgggaccacaggcacccgccacccgccaccacgcccggctaattttttgtacatttagtagagatggggtttcaccatggtagccaggatggtctcgatctcctgacctcgtgatccacccgcctcgacctcccaaagtgctgggattacaggcgtgagccactgcgcccggcctcaggtcacattttctttcttcacatttctattaattttttattggatgctggacattgttaattttatatggttgagtggtggaattttttttttctgcttcttttaaagaattttggactttgttcagacaagtggttgagttacacgtggatcaactccatccttttgagccttgttttaagctttgttaggaagcatctagaatatcatttactctagagcttatttagctttgctactaagataagagtcttttgaggtttctactgaattcctagtttttcaacaaggaagacttctagtcagaaccatatgactctgggaattgttccacctgtaaatctctatttattctttgccttaccttttgaagttagtctgtgtgctgggcttggccacagactcaagtgaatccttctgcagatttctggaattttatatgcttagcttccacttctctggcccacttccaagctctgcttgagttctttctcccttcaccacagtctgaaaaatgcctctaggcagaaagccagggcagtgttaggtctcacttcatttcttttgcatctcagaaatcacagtcctacactgcttattatccaatatctaaaaagagttttatatttttttgttcactgttctggctgttattgtgggttgaaaagtctgtttctagttattccaccgtggccactgaaaattatttcctgtttttataccttttaagataatcatggagataaaaaataaagtttacgttccttttattttctctggctatttgggccttatggcgtatattgctaataactgcctatagtgtttagcaatttcatctgatctcctgttcacatctttaattattttcaagatgacattttaaatggttcagctataatacaataatgaacaaaatagtatagaattactgtaggatattttaagcaaataaaatagcatgtacattatattaaagctcatgagtgaatgtttttaaacagtacataagttgtttaaatgatagctttgcaaagaattgggtttatcattgtagtcataaggttatcaactgttggatttaatcatcttgttttctaatcaaagatttttagaagtaatatgaacataattgatgcctagtcaaagatgatcttcggtgaattaaaatatctgaaagtaatcctataaacttatgttaaaatctgtatggattttgccatgtagcttctgttgtccctttgatagtcttacaaggaaaaaaacaaaacaaactcctatgtttgatgcagtagtgtacattattagactgttagcatgtttcttaatctttgatttttttgtttgtttttcagatcgtcagtatttaaacagatcacatcatgcgtgagtacaagctagtggtccttggttcaggaggcgttgggaagtctgctctggtaagttagccacctaactgtaactgattaatataatacaagaagaattttgacatttccttgctttcagacttctagatgccaaagagaaaaggtggcattattatatatctgatatctgtcccacaaaggacaggaaatcatttaataaccacagatgtatatagttttataacattggctcatttattcttatatttaccaaatatttattggctatcttatatgtcaagcaccagtgttgatgatgcagagaggagtaagattgttctctttttaaggaatttacattgtattgggggaaactgattattacagattctagtgggataattcctcacctgcttccaccctagacttagatggaatgaaggtcattttttgtgttcatgctgtttttatttagtacatagttactgagtttctatagtgtcagattctagggtcacaacagtgaatgaaaacagtcatagtttcttatggagcttgcattatagtggaggagatgtaataaatacacaaagaactacttggttatacttgtgagcgagatactctgaaagaaaaatacagattaatttagaagaaaggcagagtggatgtgggagacaaattgggagttaatactgtataccagataattgtttatggaagcttggattaggaccatggcagttaagaaaagagaagtaaatgtttgaggattgagtaagtggtagaactgacataacttggtgctagattgatatggggactaggagagaaggagctgtcaaggatggctcccaagtttctagtttgagctactaattttatggatggattaaaagaagaagggaaacagtggagaaggagcagtgagagtccaaatcaaagagtcatgtcaaattttatgtttgtgacatgttgaagtaataaaaaagagaggccggtgatatgattttgggtgccatcaatatggtgatgatatttaatttcatgagagttacattgctgttaggcatgtaagtcagtacctctgtcaagaatgtttgagaatatctgtcatttttaatggcatataactttcaattcagcgattccctctctaaaaatgtagcccacatataagttcacatgtgcaaaatggtgtggtcagggaacatcacaacattctttacagtgactagagtctggaaacaacctaaatgtattccattaaggggctagttaagtaaattttaatacattttcagagtagaatacagccattagaatgcaatagctctatatataccgatatgtaatgatatccaagatacattattagagagaaaaaaggtactaaacagtgtagactataatttgtgttttatatttaaaaaaatgtaggctgagggtagatacctgtaaaatcatagagtatctcttcaaggttaaataagctatgaataacatcagttactttcttgggagtaggattggatagctgggaacaagggtggtagataagcttagttatcactgcatagccttttgtgcctttttgaatttagtcctatgtccatgaattaccttttcaaaaataattttggaaaaagtccataggagtgaaagaggtctagggagatactagagagagaagagcagagcccaggactgagctctgagtacctctcaacctttagaaagtagataggattggaggatctagcatagaagaaggtgtctttacttgattcctcaaaagtcaagtaaaaaagaggaaagagatgatcagagagcatagaggcagttggacatgataaaggaagcagctttagtcaggtcatgttgccataaccataatggggtgggttgaagattaaatgagagctgaggaaatggaatatagacatttgaagaagcttgattatgagaggggacagagaatgggggcagaagctggagagatattggggttaagggaggtttttgtttttgttttagaattggagatagtaaagcatatttgtatgctgggggcaattcctctccactggagaggaaaataaggatacaggagagggaaagaggagatgatccagtacaaaaacctgaggaataaaattataatctatgtgaatgaatgaatgagatgtccctgaaaattaagacagaggataagattcagaggagtagtcaaacattacttttagtaagaaagaaatgagaaacgttggattgttttgcatttttgcaagtcttattaatgtctggcttatagaaggcacatgggctcttatgcctgcttctgtatccagtctctttcaatagcacatgttctataccctttggaagattccactgtaaacttatgagagaagaagaagagtacctcttagaatacatcttagtattgttaggaagatagtttgaccttagggagcctctgccttggaccatattttgagactctctgctctagcctaaagcatattaggaagctgtattagactgcctttttttttttttttaaatcttgaatcagcatcttgccctggagtgcagtggcgtgatcatggctcactgcatcttcaacctcctacacttaagcaatcctcccaccttagctacccaagtagctgggactacaggtgcatgccaccacacctggttaaatttttaaattttttgtagagacagtctcactatgttgcccaggttggtttcaaattcctgagctcaagcaatcctcctgccttggcctcctaaagtgctaggagtacagcatgagccactgcatccagcgtagactgctttgtatatttaaattatgtgtcgtacttagaagatgaggtgattaaatccttgataaaaatcatgattaaggtttttggtgtgattatatcttgagttgcctttgaataatagaagcttagtaggagaaagaagtttgtttactatatttgagttaatctctttagctcaagctaaaatagtatatcaaatattcctctgagtaatttaagtgtagatgacctcagtccacattcttacccttgctttttaggcaataatgtaccagaccctgttttaaagttacctaggaaatatcttaaaaccgtcttctgtacttttttcacttactgaatgataaatacgtattttctagtatgtgcttttggatgcctttaaaagttgataatatctgaaaaagatgaatgggcaatattttccaatggaaaaagtaaggctttggaatcaggaagatgtatgtttgaatctcagctggcaaataggaagaataactatttctgggacaaatgtgaaatttgaatgtggttataaattaaaagtgactagcttaatgtctggaacataatagacattcagtaagtttaaatttccctttctcttttccaccacaatttagaaaggctttaacaaatttacaagatgctgcttgaggtccagctacctgggaggctgaggcgggaggatctcttgagttcaggagttcaaggccagcccaggcaacatagcaaagaccctgtgtttaaaaaaaaattagaacctttgtcactccattaagggcagagggcatgggataaaagttactatagatatataaaggggcaataggagtttaaatattgataatttttcatgttttaattagttcagatatgttatttgtatccttgtatattaagacttaatgtaattaacagtgtattatcagtattgatgacagtttttaacatgactacctcctttcataataaatgtactcttagttatggatgtatccttatattgaaagaattaataataatattatactttacatttacgtgtttacccagaattttcacataatttcaattaatcattataatttgtaggttaagtaacattcaaaggagttttcctttaattttttaatatttctctttttttttcccccagacagttcagtttgttcagggaatttttgttgaaaaatatgacccaacgatagaagattcctacagaaaggtaaaatgtgaaacttgtacacacatgcttacaagtagttccttatgatgttaaaatttgatctgtagatttgctttttgaaaatagttttgagaaataatacaaatattgtgcatctgtttttaaaagtttcatcaagacagaacatttcttaacagaatactactttgatattcagagctctatgttctgttactgattagtgacttgttccttaatgtggacattttcctggtggggaatgttgccacatatgaaaaaattgcatataaatagtaggtgtgttttcaacttactcttttgttaccaacaattaagaccacctttatgcttgaagttatccagtgactgaacatttttatttttgtttagttttataagtttaaagatatctttagactaccaaaaaattagagtctgtgtaatactataattgggttatatgccatacatttgtcaaaacccatagaatgtaccatgccaaaagaaaatcctaatgtaaactgtggactcttggtgataacgatgtgttcatgtgggttcatcagttgtaacaaatgtaccactctggtgcaggatgttgatggtggggtgaggctatgcatttgtggtggcaaggagtatgtgggaaatctctgcaccttcccctcagttttgctgtgaaactaaaactgctctaataaagtctatttaaaagggaaaaaaaattaggtacttggtcttgacaaaaaatattctgtagaagaccagccagagttgtggaaaattttcagtattttctatgtcaaatatattgggtggggtggaggttataaaaggctagtagccaagaatattttttaaaaagattaaactttaataggaaaggattgcttttgaagacatttttagaatttacctttaatagtgctgtaacttttgttgaattaatttgttagttcatgaaggactactagtagagcagtttcattgtcttcaaattggaaacagaattatgctctagatacatcaagaaactatagtcctaattgattattcactgaacattcccagttacaaattttgcagattatcacacttgtcccataagtggtggggtggatgagtttgtggtctgaccagtggtgcccctcatcaatgtctgatctgacacagaagcagagtttaaaatagtctttaggttagcacatttatttttagaagacagtgttgctctactgaaatttccccaaagtaagttgctagttaaagctttaactgcaaagcaagatctgtacctaaaattctaagggactaacttttcttaatcccttctttattaaaacagttttccacacagttgatagttgatactttcattagaccaaccttcttttcttttataagaccaatgggtaaatagaactcagtgtataaaatttcacctttcacatagagcttttctagaaaagtgcctttttcttgaggcactgttttagctcattgctgtttattttagtactcctgtgtttcttttatgtcttaaactcagattttactgtgtatttaattttctgcatattttagtaaaattttaacaacttgaacatggtaagttggcaagattttctttaccccaaaatgttgtgcgcattttgagccatttaatatttttgtactttgttttctttggagataatataaatacacatatgtacttttttttctgttagaactatacttgttcgttgaagttttccttaaatttcaaaatatgacttttgccttttctaataacaaataagaatcgttacagaggtcagaaaatatctaaactcagcattaaccatcttggcttctgtaatatgaatagactgtacttgagaccgctgttctttattgtggtaccaagtttacccccagccattacagcatactgctggagacaggctttgtatttgttaatagttactttgatggaagaggtgggaagaaaacagaatgagattttgatgttactctttaaccttttttttttttttgcccccacagcaagttgaagtcgattgccaacagtgtatgctcgaaatcctggatactgcagggacagtaaggatgttttctctttttttgatagattttaatttgtgagcaggttttgtcatctgagtaggttttgtcatccagataattctgagtaaaagtaatcattctgattaagaagaaattctctgaacatagggattcttaagtatatgaaatcaactctgatgtagttcatgctcacatatcacaaagttcacctgtaataatctgtgtgttgggtttcttcctacattgaggtaaggattatgctgtcagtgattttttaaaatttattttaaatttagagctttagttaatatttgtatttctatgggtttaaataagaccttgtctcttggcaccatagtcattaatttttataattttttcttttcactagcattttgacatctcaaggggctggtgacagatacatgttttctgaggaaggcaaaaatcttcctcagaagatttagaattattttgagcctcctttttctaatctttaaatgagtataatgatgttagtacatcataaggtgtttgtgataagcaaatgagttaataattataaatcattaggcataatgtctgttacacagtatggaattgtgtatttgcttttattcttcttcattaataccatcacctttataatttttattaataactgatggtttccagttatactgccacataaaatacatacattaagcaatctttgcttttctttgtttatttttctccatgcacatagacttgacacattaggcaattcttagctttaaaatggatgggttcgttttttgttttgcttaagagacgaggtcttgctctgtcacctaggctagggtgtagtggtgcaatcatagttcaccgcagtctcctgggctcaaacagtcttcctgcctcagcctcctgggtagctagaattaaaggcacgtaccaccacccccagctaataaaaaaattttttttgtagaggtggtttcgctgtgttgcccaggctaatctcgaactcctgacctcaagtgttcttcctggctctgcttctgaaagtgctgggattataggtgtgagccatggcacctggctggcatttttaaatgtgataagttgtttaaaattcagcacaaagttttccactataatttttataaatgatggaaacatttcagatagttcaaaaaagcatgtaagcaaattggagtgattttatacaacaatatagtactaattatactgtatttttccattcttttttgggaaaatggcttaactcttatcagggacctttgccctcacaacaagcttctggtaaagaccttctgaaactacattttctatcagctgaatcaagctatctctccctctcccaccctcctgctctctaatgtttttagcttctgaatcagcagaattcccctttgtttccagagaccctaatagctaaaatgaatactttctgctttttttttttttaaatcacatccacagtgtacgggcattcttctttctctgtccagattgtaagaaggaagttctctatcacagagatctttactttgtgctatccaatatcgtgtctgtctcccatctagcactcaacacgctgtgttataaggcctatttgcttgtttgtgtccccagtaccttgcataaaaccttacaaacagctgcataatcttgtctcaaaatcactccttacactttgaagatttttgctttctctctttcacatacactgattcaatcagaattcttagtgattttactatccatatagaatctatatggatattataaatgatttactaccctggcttggcctgtcatttccttgatgtccatcctacctttaaggcattcataccatggttttactctaggctatgtgattaccaataagtataatacctctctaatctaatttccaagcatcttatcctccattactcactacttttttctttatccatctcacttcctcttttttttttttttttgaaacagggtctctctctgtcacccaggctggagtgcagtggtgtgaacacagatcactgcagcttcaacctcccagggtcaagaaatcctcccaccataacctcctgaggagctggtgctactgcaggtgcataccaccacacctagcttttttttttttttaattttttgtagagacagggtctcactatattgtccaagctggtcttgaactggactcaagggatcctcctgtctttggcctcccaaagtgctgggataacaggtgtgagccactgcacccaggccatctcatttcctttagtgcccttcaacttcgttacaacctgtagtccatttatcctaacatctttttattatcccttatatcttcaaccccctctgcatatagcttcaggtccacggtccatcatttataattctcttgaatatatcctcaactcccttgacttttcagcagcctttgactcagtttatcattgctttctaatgtaaaacctttattcatttggcttccaagaaacaatacttgcctgatttcctctgtctcattggttactcctaagtctcctttcctaattcctctttatctcccctacctcttaatgttggaggacctcagggttcaatacttgcacttctctttcctaacaacactgctttggagatcttgtagttgcttggttttaaatacaatctgtatgctgataaatactaactttgtaaccctgtctgtattaggccgtttgcattattgtaaagaaatacctgaggctggataatttatgaagaaaagaggtttaattggctcatggttctgcaggctatacaagcatagctccagcatctgcttctggtgaacacctcaggaagcttacaatcatagtgaaaggcaaagaggagtaggtgttttacatggcaagagcaaagagagagcgggagatgccacacacttttaaacaaccagatctcacgagaactcataattgtgaggatagcaccaagctattcatgagggatccacctccatgacccaaatacctcccacaggcctcacctccaacactggggattacatttcagcataaggtttggaggtgacaaacatccaaacaatatccctatctctcatttcttttctgaacttcgagctcttatatctaactgcctcttcaatatctctttttgtatgtcttataagcatctcaaatataacatgtccaaactgaactcctgataacctttccctgacctgggtctttccagtctttcccatctcagtaaatagtacctttttagttggttatgcctgaaaccatggagtcgtccttgactgtattttttgttatattatgtgtacatccaaactctcagaaaaccctactggctttaccttaaaaacttacccagaactcagctaccaccactagaatctaatgacactatcttggtctaaacagttgtcatctctcagctggattatttcaataacctcaaaactgatctccctgcttctcttcttcacccccttcagattgttctccacacagtaaccatcataattccatttaaatgtaagtcagatcatgttttcctcagcttaaattatgcattaaactcagagtaaaagcccaggtctttattacatttccctgaaaggtccaaatgagaatcctctctctttgtcccttctctggcccccactgctatactcacccactaggtaacaatgtttcaatgaatccagcctccttacagcttctcatacactttagacatgtttccctttggggcctttgcatttgctctttcctgtgcttggggtagtcttcctccacataaccatagagcttattccctcacctccctcacatggttgctcaaatgttacccgtgaggccttccctgagcatagtcttttaaaatataactttatattcctaccctcaaaataaactcccaacctttacttttctctataacatttattaccatcttgcatacttgatttttgtctgtctccatgtatactcctccagggcagaaatttttgcctctcatgatcactaacatatccatagggctacaactatgtcagtggatatttgttgtgaatggatgaaacttgtagaatgtccttaagaaggaggttggcattctcaataggagggaacaccaaccacagcagttctgtaaggacttttcttaaactggattttcagaactcaggttgcctgtatgtttattcttttgatttaataagaagcagagaccatgatctctagagaacatcatagaaatagtgttgctagtatttgtagcacttaacatttgtaagtaaactcatttattatataaacatttggacagtggcagaatttaattggttaccatagtggtgcaattctggaatatgcaaactttatcaatgaaaaatccaggaaacttccagtttttacatctttcccagaaaatacactggcagcagtataggaagctcagccatgttcctgtggcacaccttagacgaatttgaagctggggaaatggctgagtggtagcatagctaactccctggaatacaagaaagagtacatcagccagggtagaacaaccagaactattttagatgtagtagacaaaatagaggtagtggtcatggggaacaaggaagccaaggcacaacaagcttaagaaactttgtggatttatcttttacgtttaatgcatccagaggtaaaaagatccaaactgtatagttatttaatataaagacccaagacatacacatttttaatattctgccatatgtgctttttaagtaatatatatatataataccaaaacttttctaaaagaagattttgtcttatattaacctccatagttacaacataaagtaatgattgtcaccaaataaaaggaagtttaaaattaagtaattttaatttggcatgactaaagctcagtaactaaatgttaaccattagtaaatttaactaaaggggatagatagtcattgcactattctcacatcttttctaaaggtttggaatgagggggaaaatgaaaatacatgaacaagctcttttttttttttttccgagacagagtttcactcttgttgcccaggcttgagtgcagtggtgcgatgttggctcactgcaacctccacctcccgggttcaagtgattcttcttccaccaagtagctgggactacaggtgtgcaccactacgcccggctaatgttgtatttttagtagaggcagggtttcactgtgttggccaggctagtcttgaactcctgacctggggtgatacacctgccttggccttccaaagtgttggtattacaggtgtgagtcattgcccctgaccattaacaagctcttataaagagtttattgactgtcaagatgataaaaatattgctatgccatgggaatagaaaaagaaagatgataaaatctgccagtagagatattgattctggatgatgaagtcatagtttagtattgggcttatacctcagattgttagcacttgggcagtagttgtgtcataaatttgcaaataaaattatttaggatcaaaagatctgtttctaaaaaattatatacagctctaaatcacacaaaagcaaattaaagtggttaagaattcctttttaattctagtttactgtcattgtttctagtcacctcagttgctagaaacttgtgttatgtcttgttttctgtcaggatagcaagtaataaaaaatgttactcacttgtaattatgctgttttaaattgttgcagtatacattcaagaaatttatatatttataattgcatattttttaaatcataggagcaatttacagcaatgagggatttgtatatgaagaacggccaaggttttgcactagtatattctattacagctcagtccacgtttaacgacttacaggacctgagggaacagattttacgggttaaggacacggaagatgtaagtattttttctctctgtaagatgttatgccatctctctgtggccaaataaaaaagtgcctgttttctctattagtagaggatttggaagctatctaccacatgcctgaaagagcccctgtgaccaaaagaaaaaaatttaactttcaaaattaacctcaaaattatgtggtgagatgtttagaaaatgaggacatatgtgataaagtactcattgtgctataggttaaaaagtgcagtagaggaaaaagaggagccaaagaatacttcatagaagtgggacctgagttgagctttgaaaggtgatggttgtgtcagaaacagtgttcaaagaacattattaagatccatagtggtgtgtttttatttctaaaattccattggtataattcacacatcacagtctacctcccgggctcaagtgatcttcccacctcaaccccctgagtagttgggactacaggtgtgtgccaccctgcctggctgattgtttttgaattttttagtagagaccaggtctcactatgttacccaggcttgtctcaggctcctgagctcaagcagtcctcctacctcagcctccctgggattacaggcatgaaccattgtgcctggccaggattatattcttaaaataatttggcatatctatgtagtaggatctcttccatttttttttttttttttgtctcttccttcttccttcgcctcttcccctcaacatatacttttcgttagtatttgatgaagcttgcggtcccaactaatgcatttcagttggtggcagataattgcttatttatttttttaaaaggctaagtaatgagtatgttattgttcattttacgtttttttcttcccacaggttccaatgattttggttggcaataaatgtgacctggaagatgagcgagtagttggcaaagagcagggccagaatttagcaagacagtggtgtaactgtgcctttttagaatcttctgcaaagtcaaagatcaatgttaatgaggtaacctacaactgctgggcagcacaaacaagtgcctttttagtttgctttaagttaacagccagacttttaagaaaaaatttttatcttttaagcaatcttgattccataattttataggaaacactaagtaattcctggaaactatattttttagcttgcataaggtcactttgatggctgtatgaggatacttaaatttaccttattgtaaaagaggaagctaaaattgaagaatgtgtgtaaaatcctgctaagcctctaagtgatatgcgataaagtggtgtgtaaaaattgttacatcaccttatattgtaataattatttacccaaatgtgtataaataggttgtaaagtcaagttggaaaataatatgtttttatggatatcacagaattgtgttctgagtcttacctcacctttggtgcatgactcataagtgggtaatctgtgtgggtatggacatgtacctggaattcactcagtcctttaggcctgatacagctgatgcacaaggcttttgtgtggggcatgggggtggggtcactgggttaagcactccactatcttgaaaacagctgtggacaagaatacttagcaaataagctgcatgcctgggtgtaaagggccaacagtttactagtttactgggcccctaaaaatttagagcaatttccaactgtccccaccagtcaaccttaaatagttcccttgcttttgttaaccttaacataagccttttaaaaaaataaaaacaacagagtgggcttctttcctgccgttgcttttgccatttgtagcattacaggtaatcagtcagaattcagatcacttaactacataggtgagagtgagagtgggttaagttatgagtcctctgtttttgctattctctctggcctgtggttctgctggccactttttcttgactaatattatgcttatagactatttgacttttaaaaatgaccaggttactttaaacacctggcaggtaaaaaaaaattaagcttgcttcaacttctgtattttacagataatcaagaatgccaaagcttgtttttttatgtgaaaccatttttaacaagtacataaaaacaagaaatttataaattgtatttattcagcaaatatttattgactattgtgtgtctggcactgtgtcaggccctcaggtaacagtcactcagacagacactattcctgccctgaagaagtttgcatcctactgggggaacaagtctttcagcaataattaaagaaaaaaagtgattttgataaagaatttgttagaaattgtgaatatgtttggctagcagaacagtgacatgaggtcactatctacaagataattggccttacgggatgtggttccttgctgtccttgtccttacctccatgggacccaccaaccaagttcatcagactccaggctccggtggggctgggttgggcctgagtccagtgcataggacttctccctttgggagccagaggacagtacactacatgtttgtgagaacctacatgctattaaacttcctctggattagtttccaatgcagcagagatactttttcatagcagtcttgttaaagcagagagtttataaacgagggtttataaaaacaaacatagaaaaaccataaaatgaaatgcattagccatctcaagaatctttactttttggaaaacatacaaactttatgctcagttcttgagagtggggagaatggagcagataatttgagtttcttttaatatttttctctttataacccaataatccagctacaggatttctttggtagttaatagttcctcacacaacttttgccttgtaaatttttttgtgagttttgaatgcctgaagtatagagagatactttcaaaaattcacctcttggccttaaatttgaaaacagacaccaggacatactgcttggctaaagagccccctaattcattcatatatatatatatataatttttcaaaaactcttattcacaccactttgcaacgttcttaaagtagtatatggctatgccagaatcacagtagtcttaatcaagaattaattgttctttgctgaggctggaatagtaattggaatcaagacaacccaatttaggaatgggagagggattgagaaactctattctgtgttccctttagatttttctatagttcagagagatgaggaagaacctaggctggggcctttcagcatttctaaccaaatattatagttcgaacttgccctcatcactgaaccatctgctgctgtgaggtaggcaatgttttccaaagaaataatttagaataatactacaagcattagttacctttctatatagtaccagaaaccagaaactggctagtatgaagaaactgaaatagaaactacttgtaatttttattaacttactgttttagtttacttttattatttttttatcttatagcttatgcattgagtatagggaactaatgaaaactcatttgtggcttaagcacattgagttcttgaagttttcagagttttgaaacaacttggacttcggagttgtaaaacagaaactacaattttgtttataaattctgttttcagactttctttagaaataagatgacagagagttaaatgatttgaagaggatgggagtgggaagaatggagcagaaagaaaagaatttaaatgagtcacttttgtagcttttggataaatcattcaggtttttttttaacggttaatttagtcttgtagtctggatcatttaaaaaaggaaataggtaattatcattttaaagaaatacaattatttgccatctatcttaaaatacatgtagaccgataatttaaaaatattttactcttaaaatgtactcaaatgatgtaagaacaataaagaagaatttgtttacccttcatcagattcacccattattaaaattttgccacttgtttacagaaattacacttctttacccctaaatattttagtgtatgtatcctcagatcaaagacattgtcttacacaaccacagcacaatgattagaatcctaaaaattgatgacacagtctgtgtttggtatatattcagattttaccagttgtccctgtaatgctccttaaagccagtccattttttaatatactgcaaagaattatttattccagattagtatcaataagggacttctgtgatatttgtttttattccaaatcattagtaagtgttgtatttcatagcaaagcttatctgtttcatgttttaatactttggcatcagaattaaaatagtctgcttttatgagataagtagcattgtatttttgtctttgatactttgcacttttcatccaaaaatgaatccacaagatgtattaacaaacattatttgggctgggcacagtggctcacacctaaaatcttagcactttgggaggctgaggcagccagatcacttgacctcagatgtttgagaccagcctggacaacattgcaaaacccttgtctgtacgaaaaatacaaaaattagctgggtgtcgtggtgcacgctgtagctcccagccgttcgggaggctgagatggaaggatcacttgagcctgggaagtggaagttgcagtgagctgattgcaccactgcactccagcctgcgtgacagagcaagactctgtctcaaaacaaaacaaacaaactaaaaaccacaaatatttgttatttcaaatcaaggattagcagactttttctactttttactttaaccaaaattaacatcaaaaaaaggcaaacaaaaatcatgcgcctccgcatgtgataccttgaaagggagacagtatctcttttgtcctattttagacaaaaatgtatataacctgaatctaatcacgagaaaacctcagataaacccaaatcaagggaagttactagcctttatttttcagaaatgacaatgtcctgaaaggcaaaggccaaagaactgttccagatttttaaaaactaaagtgagaggaaataaactgcaatgtgtgatcctgaatggatcctgtccttggaggggaaagttactataaagtacattattggggcagttgacaaaattggaatttgctctgtagttatacaaaataatgtgtcaatccttaaatgtctcaagtgcaataactataacgtgtttatgtaagagaatatccttgttcttaggaacaacttaactgttaaaggacttaatagttaaggtctactctcagatgattcagaaagtgtgtgtgtgtgcacgtgtgtgtgtatgtatgtgtagtaaaagtggcaaaatgttactaattggtgaatctgggaagaatagaaccgaagttgttggtactatttttgcaacttttccgttggtttggagttttcactatttttcactaccagttctttttcttgatttgatgtcgaatatctaggagcaagggcatttccttcattataaataggtaagtcctgctttctaccctgattgaaagtcagcagagccttctaacaaacctgactttaaaagaaagaagcagaatgcagatctaagaccagaatagtacttaccagaattgttttgtggaacaaagtctcaaaaactggtggagtaagtactttttttcttgtttttacttagatattttatgacctggtcagacagataaataggaaaacaccagtggaaaagaagaagcctaaaaagaaatcatgtctgctgctctaggcccatagtcagcagcagctctgagccaggtaagatgctaaaagcagaacaagtgcctttctcatgctcctattttggctttttccagactttagctacttcccatttcatctgttatggtatttctaagcttctgtaacttgtaaatgtgatatataacttgtaggtacgtcatctgttggataacttgccctctccccttgagattctaagctctctgacagcagggaccatttctgttttttcttgccactgtgtccccagtgcttgatacagagttgggttttaaaaaatagtagttgaatgaatagaacgccttcctagatgactcccaaattcattcttaattgaagtgaaacagtagttgctctgaaaaagtttaagtgcacatttggtgaattatcccaaagtgacatacccgtatataacaacaagagtcacccttccccaaattaaattaaaactctgccctgatttctaactccatggattagttttgcctctctttgaactttacataaacaaaaacgtagtgtatttcctgtgtctggcttcttgcactccaaaatatgtttttgagaattatttatgttaaatgtatcaatagttcatttttattgcatgacagtactggcagtatgtttatgtattcttctgttggtgttcatttaagttctttctttgggggaattagtatgaataattctgtgcacattcctatatgtctttgtgcacatgtacatgcatttctgttgggtatatatctaagaatggaatggccagatcatatactatacatatggacagctttagtagatactgctaaaaagtttttcaaagtggctgtaccagtttacacaccctgcaacggtttttgagttctacattctccccaaaattgatattgtcagtcttcttaacttgacccattccaggagatgtgtggtggtgtatcagtgtaattttggtagttatttccctctctggtatgagtcaacttctttcaaataaaggttttctatttgggcttctaagtattagttgactttaccattttagtttccactaagtgaccccattggaaagaaatttatgacagcatttaagctgactctcaagtgagaaaccaggatctatggggacttttttctttaatttgtattgtatttaaatcccctgaaggtttctacttaatcagttctataaataataccataaaagattattttcatggagtggatttattacataatttggtgcttattacatgattattactaaacttggtctccagttggagtaaactggtcccactggaaagttggttacactaactcttgtaagtctcttggtccatttagtagattatcccttaagagctcccaattaactactgtgtgcttccttagagatatgaatctctctattaagggaaacacctgagtaattgtagttccttttttaaatgaaggtacatagaggaaaaatgggcagaaaggagaaaagggcctagggattatctctggtagtcagatttagaaaagacagcatctggctaatgtttgctttaggcttttaatgaaatcttaattcaataactttttttcttttttttgagacggagtctcgccttgtcacccaggctggagtacagtggcacactctgctcactgcaacctctgcctccctgggttcaagctattctcctgcctcaacctcctgagtagctgggacttcaggtgtgcaccaccatgcctggctaatttttgtatttttagtagagacaaggtttcatcacattggcctggctggtctcaaactcctgacctcaggtgatccgatccacctgcctcgacctcccaaagtgctgggattacaggcgtgagccaccgcgcctggccttgattcaataactttaaatcatcagttccctgaaagtgattattaagattactggtgtatgtatttgtttaggtaaaggtgcaaagatagagaaaatgaagactccagttccagttcttaaatactatattatttaactctgttatagttgactggcttattgacagctcattaccatggctggccctaatttaatttccagttctcacaaaatatccttttagcttatgttaaaggaaaaggtgccatctcctggcctattacgatttttaaaattcatttatacacacccaacaatgtgacagtcccttgtgagttttaccttagagaagataaatcttgacctagatctggaataagactttagtcttgcttgcataaattcttagactctgatgtgtgataaagtttacttaataagtcatccaagatctctgtggatgtttgataataccaaataataggtgacttagcaatcagactgctttgcatacattttagtgtgattgtagatttgaagtgccatgttgttcctgtacttttaaaagtactgagatacaggatagatttaaatagaaattataaacgtttttagtaagagtacatgaactctgaggccaccttatctagtccatagcctttaggcaaaattgtattgaatcatgttaatctcctttttatatgtcccagttttaaagacatctgagagaaattcatcatgtggattattttacctgattcttgtctgttgacaataagactaactttgattcttctgctcttgactatggggattagctctttctgtatcatcccttgccttaacctgtattagaaatggtaattctaatatataatcataaaatgcttgaataaagaatatcttatggaaagtttatggaggcaggtgtgtccttcagtaaaaaaggaaagtaaaaataagatggtaatgagatagaataaaaatatcattgtcttcctttgtacagacaggattgtcagatgtaatgggaaacactataattgagtataactaagtataactgaggataattcaagttgatcagttatagactcctcttgtaaacttctatttttgattttttaaaacatttttaaagggaatttaaaatagcactgttactgtagctgtttagcataatttagttctcaagttatgatcagctaaaatcattatttttttattttattgaatacctgcttgtttagtaccattttctgacatcaagagattaaccatacatatatgtatatctgtatccaatgtcttagattacaggaatgaagaactgttgcctaattggaaagtgccagcattccagacttcaaaaataaaaaatctgaagaggcttctcctgttttatatattatgtgaagaatttagatcttatattggtttgcacaagttccctggagaaaaaaattgctctgtgtatatctcttggaaaataagacaatagtatttctcctttgcaatagcagttataacagatgtgaaaatatacttgactctaatatgattatacaaaagagcatggatgcatttcaaatgttagatattgctactataatcaaatgatttcatattgatctttttatcatgatcctccctatcaagcactaaaaagttgaaccattatactttatatctgtaatgatactgattatgaaatgtcccctcaaactcattgcagcagataacttttttgagtcattgacttcattttatatttaaaaaattatggaatatcatctgtcattatattctaattaaaattgtgcataatgctttggaaaaatgggtcttttataggaaaaaaactgggataactgatttctatggctttcaaagctaaaatatataatatactaaaccaactctaatattgcttcttgtgttttactgtcagattaaattacagcttttatggatgattaaattttagtacattttcatttggtttgtgtgtttttgttattgtttatagattaaagcgtttattttataatgaccacattgttttaaatgcgacagtagctcctttctgcctagtatctgcagaacactggctttaaactatactaagtaactggtgatttctctaggaacagacctcgcactttctgttctaaatatatttattcctactatacagtaaaatacatcagacaacatagaatagttttgtatattctctcttgatcttaaagattgtatcttattgaatatcccactgtatattatttttatatgtaaaaagataagtttaatactgtatcagggtttaacttttactatttcagatcttccacagcttgtaatttcatcaagggaatccttttgcattgttaatttgttgggtgtgagtccaccaatgaagtgttatgtgaaaaatttcaaacttgctttataatagattgaagaatttgagagaagtgagagaaagttaaaacacataaaaggaatgtgttacttttgcttaaactacttatgaaatagtatggtagtagtaatatggaagagattgctaagttaaaattgtagcttcctatatagtggtgctttttcttttccttcccagttattttcctctttacaaaagatagggcttaagtaagacatggacccagggtgatactacttatgtagtctctataaagagaggtagaacaaaaagcttgttagccaattaagttctggaaaaggaaagaaacaagcttagaaaaccctgtgccttgtcctcaaatattaaggaggagacagaccagtcctagaaagtctaagtcattgctcagggatctctagatactgtctctttgcaactaggtatgaagaagtgttcatgccttgctgagattttccaggcatgtggtcagcctgtcacttactaaactgaaattttaaaatcaggtttcaaatgttaagctttgaccaacctgagaaaatgttaaagtattgtttttaaaaaaatggaaattttttttgtttgtgtttttgttttagtttcgaataaacttagttaccttacacttcccttctacttatccaattatgcatatgtctgggattgaggggccaaaactatagcgaacttgaatgaagtattagggccagttgtcaggtcagggtggcatcttttattttaaggtcctctaaagtcattctgctttaaaacacccctcaaacatacctttaaacttaagatcatagacagacatctcatcaaccagtaaaactttctaaatactaccttgtcacatctattgtgtagttatttaacagattaaatagaagtcatttaataagactccaagtctcagtctgcttgactagtagcataaactcagtctattctattttagaatgtggtggagaaagatgatagttattagattcctttgtcacatcttatacagtccacttgggttaaaggtggaactgtcaagaaaaacgcctttctggcacacagtgatatgcagagcaggaccagctgaagtcagatgtgcaaggaaatctgtggttgctgagcaggatgaaaagtatcctgttagaaagtgagataggtgtgtttttatattgtcctaatgtgaactccttagtcttggttccaaagggaagggtacctgaaaataaatgtatttttatagctgaaaaatcaagagtttctaggatattgtgtgaatgtcaaatgataaatatctagaaactgatttcatattagtatgtgtggctatttaaagtataatgactttggtttggttatatgagtgacacagaatttaaggaggcttcatgccatagttcatagtttgctctaatggcttggtggtatccctgaacagtctacttttagaaattaacagtaaatacacaatccagctgtaatcttaccctccaccagggggagcttcaacatcggttaatactttttttttttttgagatggagtctcgccctgtcgcccaggctagagtgcaatggctcagtctccgctcactgcaacctctgcctcccgggttcaaacagttgtgcctcagtcttccaagtagctgggattacaggcacccgccaccacgcccagctaatttttgtatttttagtagagacggggtttcatcatgttggcgaggctggtcttgaactcctgacttcgtgatccgcccccccctcagcctcccaaagtgctgggattacaggcgtgagccaccgcgcctggcccggttaatactttcataagcattgaagtaactatttaagtcctagtacataaacactgtgtggttcacaaaaaggcatagagacattctctcaagagtttacaatctaattgggcagggaagatactacagttcatcaaagatatgaataacaccctagttttctgaactgcagctgcatgggtaattatcttaagaacttttggcaaaatatggatgttggtgtgttactctcttctccctacaactctgaactaatctgtgtttggcaccttgatttgccatcataaatggccaccatttactcctcactgaaatattcttcttctttgaggttataatgtacttggaaaagttaatacttatagaaaataatgatctttattaccaactttattaaaacaggcttggaacatttttctccatagaagaatagtaataagacattctacatttcctggacatggccagtttaaaatattttgccccattacccttgtagatacacatgtatttgtcagtttatgtgcctcagttttgtcttaggcactgagggacagaaagagaaataaggaataccttggtattttcctttgcaagcaatcacagcagaatgctagaaaacataaaatatactcttataaattgtatgtgtgttgaaaccaaagtgtgaagaaattgtcaggtatttggaggaggaaaataatttgtaaaataacctttttaagaatttggattttgtacttatttaaggtgctaaatatgtgttaaaatatcccctcttgaatcagctccaggcttaaaagggcagagtggtttggattcttgtccagggtctggaaagagctcatcttgccgagagggaaataaatgtgagctttgaggcggtctaactacccagcttttagtatttatgttccccaaaatgtaaaaactgtaagttattcttgaaaatgtagtccagacatttctttgatcctggattttactgcagtttcatcatgggtttgttgaatgtgcagtccatttattgccctgtcttgcttaaatattcttgttgagaacagctggaggctttgactgggttcctagttctgttttctgggaaggcaacgtggattctgttttgtagacattaatgagctttaaatgggaattggggatgatgtatgttcgttgggcatgctgagaagcggcctcctgtggttctgggcccaaggtgtgacatacatttcccactaattgcttctctcaagaagcaagagattggctgttcctcttgaggaaaaaccttaataaaccttcccattttaaacagtggtgtgactcttattttgagctgttgttttcaatgaatttttttaaagcttaccatgttcaaatttttgtgctgaatgttgtaggacatgcaaatcagaacaggacatgatccttaggggcctaccaacaaatattcattgcacttctactgtatggcaagtgctgatctgcatgccgcggaaacaacagtgaacagtacagactcagatccctttcctcgtggagtttttatctttagaaaatggtaaaagataacttgtgtaatgatgagtgctttgaagaagaattaagccgtgtaaaggggcaagagtactgggcagaggtggtggtagtgggttaatatctcattgaagttgatactcgagtaagtgttcaaagtgagcagcccatgcaactgcctgggggaaaggaggattttccattccttggggaaagggtctgtgccaatgccatgaggtggacatgtgcctggtgtgttgaagactggcaaggaggtcagtatgggtggagcagagtgagcaagtgggagaagagtagtaaaagagaggtaatgggattgagtagggggaaatttcccacagcatttactctgtgttgagtccacggaaaggatttcagcagagggtataatgtgatcagactcctcaaccataatatgccatcaggagtgctccgttgagctgagaatagcccgtatgaggacaaacatgaaggctgataccacttagaacacggaatcatgtgagggacagtgatttggaccatagtggtagcagtggagtggctatattctaggtgtattttgcaagtggagccaacaggatttactgacacataagagtataatagagagggaacaaggaagaatccaagatttgggccaataatcaagattatgacaggagcagattggaaggagaatgaggaatgggcaggagttccattttgaacctactatgtgtaagaagtgtgtcacattctagagatttatagtaggcagttggatacgagtcgaattcagcagaagcagtctggagaggacattcagtattttaaaacatgaaactatggaggatcagtagggttgagtgtagatagaaaagaggttcctgaggaattctatcaagaggttgagagatggagaggaattagagaaaaacatggagggcactggtgactttgatggactgtggaatgtttggggacattgtctggagtagacacaggaaaaaatgcgaagaaaaacattggagacatcaagcatgcattaccctattaagatgggtgaaacagtgcatgtttctgagctaagggggatgacccactgagaaggaaaacagtaagctaaatgggtggagtctagtataaaagtaaagaagctgactcaggagtgtaggtgggcatagttgcaggagggaaaatggtatataggtatagagaaggtctcaaagaaggaaagtagtatgagacgggacagatgctttccattctgggagatttgaagttcctcagaggggcgtttgaagtaggcctttaagaaagggtgggattggctgggcacggtggttcactcctataatcccagcactttgggaggctgaggtgggtggatcacagggtcaggagttcaagaccagcctggccaacatagtgaaaccccgtctctactaaaaaatacaaaataagccaggcgtggtggcgggcgcctgtaatcccagctactcgggaggctgaggcaggagagaatcgcctgaacccgggaggcggaggttgcagtgagctaagattatgccattgcactccagcccgggcaatagtttaagactctgtctcaaaaaaaaaaaaaaaaggtgggattttcaacaggtgagagtaaggaagaatattatagacagatttccggaaaaagcaagtgcagaaaacggaaatgaacaagaagttatctagttccatttagtgttgggaaatgtggaaggaataggctggaagaatacattggggccatgtcatggctggccttgaaacaagaagttaactatctagtaggttgaattaaatatctagggcataggaaccacctcagtgagacttggtgaggacagggatggagaaatttcagacctgagtagcatgaaaatcacagttgtaagggttactctcttatgaattctgatggtcctctcttcatttctcacttcctttcccccctttctttaatgaagataacctctaaggccatgactcccagacaaatgttccatttagaagggaaccagcattcattgtttggccctcaaagatgttaaagaagagaataatctctttttctcgccctgtattcctgtgcttcacttgccatgattctgctcttctcagactctttagcagaggacgtagctcctacctggcaggcagactgttggtatcctcccagttttcctctctactcctacttcatgaacagcatgagacagcagcccctctgtcccatcctagtgatctaccatatcatattgagaaggcttagtggggactgttccttaatccacccccatctgttagccgccaatgttcccaccagggtcccatcatcagacctcttgtgggtgagacgaagggcacgggccacacttctctagccgctgtcatccttgcccttagcatcactaatgtctccagttgcacaggttggggagttcaacgcagccaccaggatcaagggaactctaagcatgcagcctcctcagtttggaaagtaggatttggaatagtgagactaggcactgggacctgcctgtcttccttggagaggggatacatgtgcatggagaaagagatgtttgatccttatactcccagcagggtcctgaagcccaggtcagaagctttggaattatttgggcccttgaaatcactgacataaagtctaactgggatatgaattttattttctggaatatgaattgacttaacagatgcttggaacgtcagagcagggattctaacacctgcttaagtcaatctggcccattgcttactaggataactcagctccctaagccagttgcgtggtgtgggagtgcaaggggaggccctgggccaggacatggaggtgatctgtgtgatgatactaactttggcacctctgctcagggagctgaggctatgcagggatttcagttcagttactccatttgcttcttttttaatgcctatctgcccatcccccaccccccccctttcctacctcttctacacaaatgactatactgctgctgccttactggcagctcaatccctggtagggagacaatgcctggagtgtggccagtagtggagccggaggcagggaaggcgctgaacacccaactctcaacttccttccccactgccctgccctgcccctccctccataatcacaatgatgggaggagaatgtagcagactcaatgtccctagtggggccaccagcatagcaaattagaaaaaatctttgggtagggtaaatctgggaccagatgttgttgccaaagaggacaaggagatgaacccagccaggaagacgagtggaaagggatcgaggaagaaagggaaaaacgtggaggatagggtaaaggtgacttcctctggaatggaaattgggacccacttgggattgagtagacgtgggaattgcctgtgatcatctgaagggcctgggttctggatagccaataagagcatgacaatggggacagggagccaagtgggaggggtgaggactaaggctcaccagacggcctacattaaaatagaattggcctgggaggctagggtggagaagccagagcaccaggccagggacaaaggagactgcccaacagcttggagagggtgctggggacagagagttttcctgctctcttgaaagtgactctggccacagctccccctcttctggagaacgggctgaggacaagagtgaaaaatgggctttaggaggcagctaaggaggccttgactgctggtcttccctgaagcaggagatgggctcagcccagggctcactttgaggagtggaggtcacccgggaacccagtgctcagtactagaggtacggaaatgagtaaggagtatttgccacccaggaggtgcaacaatgtagagaggaagataaacatgcacagaagtaacttacataacaagtactggcagtgggggaactagattcctcaggaaacagcatatgcaaagacctagtggcatggaaagaacccaagcttggcacactcaacccatcaccttggagggtaaactgggtgggatctaattgggcaggactgggctagacaccagggaagacaggagacaggatgaagtgacaggatctcgcagacagatcctgcattcactcctctgtccttcagactctgagcaggaggtggcggtgaggcagacggtgaggcaggcggggctcaagtagaagcatgggaaagggcccaagtggaagctcgaggtgaggccgggggagagcaagggaaccacaggaaaacaaaacttgattcttcttttggatgaggacagcttcccctgcaaaccagcagtccccaggcagcctcagatgggctcctgagacacccttccctggccagttgaaggaaactgggatcatcacattcagagtggagaagactcaaaaagggacaaggcagacagcccagagccaggtcatggtgggtggaggcgagttgggaacaagattgggtgggggtgtagagctcacaggagctggtttttggcagtgtttctggtatgtccctgtaaagggccagtcatcttgaaggacatgcccagaggggcatataggtgaataggttctgtgagtggaagccggggactgtgcgcagccgtggcctgaagccaggcatagaattctgctctttctcctcaaagatgcaaggaaaagggaaagcatatggtgattgtcatggcccccttgtcaaataagtattgccccaaactgtgttcagggacacactgctcctcagtgtcctctctgaccaggaacacagaggcattttcaggggatagtgtgtgtgtgtgtgtgtgtgtgtgtgtgtgtgtgtgtgtgtgtgtgtgtgtgtgtgtgtgtgtggtggcggggacgaggaggactccagtgggagagaagagtgtaagaattcaaggactttgtttccgggacattggcaaggccgacttcattggggcgcccgtgcatgtgcatgtgtgctccggaactggggtatgtagatctggggcttggagggggtggacagagtgataggtcaggactcactgaagggtagagagccaggaagtacgtcctctgtcaaattcagagggaatctggaagagaggtttcatcatactgtttattttaggggttgggtggaggaggcaaaaggaaggcaagggacatcctagtaatcgtactaaggggatggctgcagtttgagctgctttcccctaggcctttctggttcagtcaccctttctctggcagcaccagcccgagccccgagacctctcctgaaggtgggcttcacagattcctccaccccatcaggagggaatggattttaggaggacagccacagcacctttaggccattagtttccagggtggccggagggcaggaggaagggagcgatgtgggggctataggggactctggcaactaagactttacagagcagaaagagcagaccagaggcttctcaaaaccactaggacttggcactttcaactctttaccccttgccaagaatttgaggtccttaagggttgactgtgaggggcagctagggtgtagggagtgggaatgtttcctagagcaggtccttaggcagtggggtcctcaagcaccttttctccaagctcagcctttctccacctccacaccccccgcctccccagtgcatgtcatcctttggggaacagtgtaaatttgccatttagcaaataacagcccatctgggtggctagtatacagtgtacaaaaacatgtcacctattgtcttctctgacccttgctacaatcctgtgagatattaaatcaatataaatgtttcgacagaagaagagaccaacgctcagagaaagcactttttcttaagcacttttgccttgggtcacatggttagtgcctctactaaggggatgggttgtccagtatctgctgagcttctgctgtattccaggcagtgcttggaccgtaggtgcattatgtcctttaaatctcacagcagccccacattatcacctttcacagatgagaaacacaaggttcagagagatcaagcaacatgctcaagcttccacagtgacagagggggctctcaaatcttaactccaagtctagtgctcataccatggtgctggcagaagtgccttaa

SEQ ID NO: 821 - DNA, 1294 bp, Homo sapiens
atcgtcagtatttaaacagatcacatcatgcgtgagtacaagctagtggtccttggttcaggaggcgttgggaagtctgctctgacagttcagtttgttcagggaatttttgttgaaaaatatgacccaacgatagaagattcctacagaaagcaagttgaagtcgattgccaacagtgtatgctcgaaatcctggatactgcagggacagagcaatttacagcaatgagggatttgtatatgaagaacggccaaggttttgcactagtatattctattacagctcagtccacgtttaacgacttacaggacctgagggaacagattttacgggttaaggacacggaagatgttccaatgattttggttggcaataaatgtgacctggaagatgagcgagtagttggcaaagagcagggccagaatttagcaagacagtggtgtaactgtgcctttttagaatcttctgcaaagtcaaagatcaatgttaatgagatattttatgacctggtcagacagataaataggaaaacaccagtggaaaagaagaagcctaaaaagaaatcatgtctgctgctctaggcccatagtcagcagcagctctgagccagattacaggaatgaagaactgttgcctaattggaaagtgccagcattccagacttcaaaaataaaaaatctgaagaggcttctcctgttttatatattatgtgaagaatttagatcttatattggtttgcacaagttccctggagaaaaaaattgctctgtgtatatctcttggaaaataagacaatagtatttctcctttgcaatagcagttataacagatgtgaaaatatacttgactctaatatgattatacaaaagagcatggatgcatttcaaatgttagatattgctactataatcaaatgatttcatattgatctttttatcatgatcctccctatcaagcactaaaaagttgaaccattatactttatatctgtaatgatactgattatgaaatgtcccctcaaactcattgcagcagataacttttttgagtcattgacttcattttatatttaaaaaattatggaatatcatctgtcattatattctaattaaaattgtgcataatgctttggaaaaatgggtcttttataggaaaaaaactgggataactgatttctatggctttcaaagctaaaatatataatatactaaaccaactctaatattgcttcttgtgttttactgtcagattaaattacagcttttatggatgattaaattttagtacattttc

SEQ ID NO: 822 - protein, 184 aa, Homo sapiens
MREYKLVVLGSGGVGKSALTVQFVQGIFVEKYDPTIEDSYRKQVEVDCQQCMLEILDTAGTEQFTAMRDLYMKNGQGFALVYSITAQSTFNDLQDLREQILRVKDTEDVPMILVGNKCDLEDERVVGKEQGQNLARQWCNCAFLESSAKSKINVNEIFYDLVRQINRKTPVEKKKPKKKSCLLL

SEQ ID NO: 823 - DNA, 70019 bp, Mus musculus
aaagtgtgtttttattctctgtatctgcaatataaaaggtagtcactgctagagtagccaaacagtccatgttgttgaattgagtgactgaattttaaacattttaagaaacaaaagattgaataaagaaaagggtatgggctaggaagaaagcttgataacatagctgaataatagcggggagttgaggatttagttaatttgcacttacaattcatctctctgtgagactgtacagctcttctcagcagctgattttatctgttcaggctgacatctggtcctgagactcgagccttgatgctaaagtaattcaggccagttcattgttctcaaagaaaacaatcagttatgtccagtttctcatgtggatacagatccacactctagacaggccaggattgaagctatgctcaaaggggctgtgtgggtgtcagaggctaacattctgcctgacttcagccctatgctttaggagttctttagctctttgactttctttcccagttggtagaagtggcaattataaaaactcccttgcacaactacactatggattcaatgaaaaccattcatgaaagtaacattgcaatactttatgggagtatgtgctaaatacttgtgatttttttccttcttttctacttctggcagggagagaagagaggtgaagagtagggtaatggtagaagaccagacaaagacaggagttgtgaaaagcaaagtggactcagacatgatagtatatacttttatcccagatctcaggagtagttaaggcaggatgatgagtttgtggccaacctgggctacatagtaaggtcgagtctagcctgatgtatagaacaagagcttatacaaagaaaccgagaagcaaaaaaaaaaaaaaaaaaaaaattagccaggaaacaaaaatgacaacagcctggttactgtgtaactgcttaaaatctgatgaagtacagatccttaccacactgctcctgagtagctgactccagagtcctgatcagcatggaaggacattcaaacactgccaacagatatcaagacagcccagcactagatggcaagcagtagccttgtgtaccccaaggagaaaacatagagactcagagttaccatctgttattggttgactctaacatatcccctatagctcaggttttattgtttatttatttactattaaaaaggggattgtgtgtgccacacaacctgtgcagaggtcagggggcaactctgtggagtacattctcttctacctatacatggctgctggggattaaacaggcttgtgtggccagtattttacttactaaagcatttgccagccccaaggttttgtttgaatgcttgtttctcagctgctggcaccatttaggagatgggcttccctggtagaattaggttacttggagtaggtcatgaatagagctctgcttctggcttcagactgcctcctggtcccctgccatgtgataagttaccacatgctccatggactaagccattctgctgcagctcccctgatgaatctgtaagccaggatagtattttcttcccatatgtgtttcacttccaacacccatgcctttttttttttttttttttttttttagcaaccaaggattgaattttggacattatgcatgctggtcaaatgctctaccattgaactacattcctctgaagttcttaagtcatttctatggtatttaagtcacagaaacgcagatgtgactaataccccatctcagaaaattataagagtgtgtagaggtgtacagcagcaattcctccaaataacaaataccaaggagagcagaagagaagacatttataaccagttggtaaacgtcaaggactacttcaaggaactccaaggcagtgtttctcctgaggttcctaaagaagaaggaaatcaaccattcatattaaggtcttgaaaaactcccaaaatgtaggcgataagggcctgttctttctacctgttttaagaaggttttggctaattagtgttaaaaaccgttaaagagctcccaatggactctaaacaggcttatcaataggtaggtgttgatgtggcaggggtggcagtagaattctaaaacgggataatttgttagctcaatttttctctctaaaaatgttaactttgtcagtgattgctagttagtgttagagatggagaaagtggctagaaagcacagttctgtagccagtgtctcttgcttctgtgaaaggatacttttaaaaaggacagctgagggggctagagagatggctcagtggttaagaacatggagtgaaattccatcaagcacatggtggttcacaactatctataagggcatctgataccctcttctggcacgtgggtgtacaagcagcaaaacacttatacaagaaagagggagggagagagagagagagagagagagagagagagagagagagagagagaaagttttttaaaggacaactgaagagactacccaattttttttgaaaggcagatgactcaagactaaaaaccctctctactgatgaaagttatcttgttgttttcagtcttgtcagaaatatcacaggaggtgggcttaaattttctttctatgttagagatatacagtttcttttaaaatatttggaaataaaaatggcaagatcataagttgtcactcataaatgatgtttcatgatgtcctgaaagagtttaactgaagatcctgggtaggaaaagttaaattaggatttaagactggactacatttccctcctcacacacttagggaatcacagaaaagacagagatgggagtgtggagtaactaataggtaagtgatcaaaaggtgccagcaaagatgcagatgctttaaaaaatttatttattttattatatgtaagtacactgtagctgtcttcagacactccagaagagagtgtcagatctcgttacagatggttgtgagtcaccatgtggttgctgagaattgaactcgggacctctggaagagcagtcagtgctcttaaccactgagccatctctccagcccgatgcagatgcttttaggagatggtatcaaaccttaggaaaacaaactagaacatttgtaccacaaatacaggctccaggctactgagaaggtagaagaaatatgggacttagtgaacagcagatcctacagtaatgagcagagggactgacgaagatactgccagcttctttcccttcatctgcttgtaatgcctatagttaaagtgcattcacagatcctgcaaggcaaggaacagagcagtcacaagggactccaggagagaaggcccctctacaaacaaagatcacatctcccagcatgcctgtcacattgcccaaaatcaccagcccacctgtttcaagccaagcagagagctaaagagtagaataaaagaaccgtacatgtttatggaaactccaaactcaacaaatagaagatgcagcacatagagttgataaatgagagaaagggtgagattattttataaatttataattttaagaaaagcataagtatgtaagttatatgtttatattctgagtgctgggacaaaaggtatgtctctttagttacagaaagtaactatttgtattggatgtgttatttgggaagcaaactgactttcttttacttttacccttctcatcctttgagacagtctcctgtgtagccaagtttgctttgagctcataatcctcttctttcatcttcctgagtgctcagatataggtatgtaccaccatgcctgtcaaaaggttgatttttgtctggtatggtagtacatacctttagtcccagcactcaaaaggccaaggcaaggagaattctgtgagttcaaggccagcctagtctacatagcaagttctagggcagctagagctacatcaactctgtctcaaaaacgtttttgattttgttctttttatttgtgtgtctgtgggagagtgcaccatatgtatggctgctcacataggtcagaagagagcctcagagtccctggagctagagatccaagaagttgtgagttaccagacatgggtactaggaaccaaacttgggccgtctggaagaacagcaatgatttttaaatgctgaaacatttcttcagtccctgaaatgttctttttggggtaaaaatattaatagatatttatcaacaatagaatcttttgaaacaattactatatgataaacttcaacaaaataagagtccaagaaagactgaagacaagattcaaaaatcaatagagagtggaaaaatcagttaatttgtagttgtctaactataatgtgattaaaattaaagtctagattagaatttcacagatctgcctcagtaacaggctaaagagaaattatttcagttttatgatccatatggtctttcaccacacctgtgaaagcagtcgtagatatattagtacctgaatggtaagcttgtgttccaatacaactttatttactaaaggagggaacagaccaactcctatttagaggattgcaacataagagtgtcaggataaagccatgacgaacagatgtaagttctgaaagcatgataaacacacagaattaagtagcaggggaaagttgatctgtcattcagtgacaatgggtaaaataacttcaataaaaagaaataatttaaaatttggtaaaaaagaatagcaacatatatagctatattatttagaatgtaaataatattataatgagtctataagggggctggaaagatggttccttggcttaagaacacttgttgctctttcaaagcaacaagttctttctgttcccagcaactacatgatggctcacagctatcagtaactccacttccaagggacccaacaccctcttctgacctcgatggacaccaccatgtacagactgtaaatacacataggcaggcaaaaacactcatagacataaaagaaaataaaaaggagttgtttgacgctattttaactaactaaataactaacaattaaatatcacgtagtcactatcaaaagaaaagaaacaagggaacattgttagactaaacaaattgaatgtaagaaaaaatttgtcaaccctatggatgaaaataaatttcatgagaaattttgctagcagtgaaactttataaatcacatactatatcatcaaaatcatctttatcacagattttatgcagtaaaaattaacagaaaagtaagaacaaaaaacttggtaactgttggtaaactaccatgtacctcagaaactgacaggtcaggtaggagagctgttggagtacacagaatttgagcaacacaacaaagcagctttcttgagtaaaggactttgtccacaataaacagtgaatgtcctgtctcttccaacacatatgaaacattaaccagcttgctaaaactcaaggaagatgttaataaagttccagataaaaaatcatttaggttacagcctttgattacactgcaataaaatttggaaataataaaatggcagggtatggtgctcatgtctttaatctcagccccctgggaagccaaggctagaagattacctataatctgagccaaacctaggcaatacagtgagtttcatgttagcctaggctacacagtgtctcataaaaacactgtagtcatttgaatgagaatgtcccccaagggctcttgtatttgtccttagtcccttgttggtttaggtctcagagtgtgctcttgccagagaaagtgtgtgtatgctggggttcattgaggtttcagagctttgtgccatcccaagctggggcactctactccatgcttttggtttaagatgtgagtcttcagcttccggctccagttgccatgcctgttatttgctgccatgcctggcaggttttcttggcatggcagactactaacactctagaaccataagctgaaataaactcctactataagatgccttcgtcatggcatttcatcacagtaatagtgataaagtaactaatagaaccaatattcaaacagacaaacaaacagctaaagttttatacccaaacatagtacctcaaatcccagctctcaggaacctgaggcatggagatatgattcttttgaggtcacagagtgggttccagagtaagacctcatctcacaacctcctctaaaactgaggataaaagagaaatgtgcatggggctggagagatggctctcagtagttaagagcactagctgttcttccagagaaccagggttctattcccagcaatcactggcagctcactactgtctataactcctgtttcaggggatctgacaccctcacacagacatacacagaggcaaaataccaatgcagattataaattagaaataagtaagttataaaaagagaaatgtgcaaactaaagttaactgtcaagaaatgataatacataaaaactatagcatatacttgtacaattagcatgttgcaaagtgatctatgtgaattgacattattttttacaataatcttttcacagatgaactgaaatacagagctttgggttaaataacctgtctagtggcacagtcataaataacagggttcatatataaatctaaatagagggtcagcaagatgtttctgttgtcaaaggtgcttgctgccaacccttacaacctgagttgaaccctcagactcacatgcgaaaaccaacttcttcaggttaccctctgacttacactcatgcaccatggtacatatgtatgtgtgcatgtgtatgttcagaagatatggatatatcataaatacaaatgtaaatgaactatgtatatagctcacaaagctaataaaaacaaagttaaactattgcatatgccagcaaggttttgttgacaggaccctaatatagctatcccttgtgaggcaatgccagtgcctggcaaatacagaagtggatgctcacagtcatctataggatggaacacagggcctccaatggaggagctagagaaagtacacaaggagctgaaggggtctgaaccctataggtggaacaacaatatgaactaacaagtacccccagagctcgtgtctctagctgcatatatagcagaatatggcctagtcggacatcattgggaagagaggccccttggtcttgcaaactttatatgccccagtacaggggaacaccaggggcaagaagtaggtgtgggtgggtaggggagtgggcgggagaggatatgggggactttcgggatagcatttgaaatgtaaatgaagaaaatatctagtaaaaaattgaaaaaaaagttaaaatataactgagagaaaagatgttatttttaaaagtcttgaaaagaatgaaatgatagagtaagtttgtataaaactaaaagatgattctttgaaaagagaccaaaaaaaaaaaaaaaaaagagtgccgggaagagtggaatttgtccaaggtagaggaagactgtaagagtcaggacaagaaatcagccttaattatagattataaaatgtccaaaatagatattaaatgtaaattttttttttgtttttgagataaggtctcactatatggcccttggctgtcttggaatttatagagctgcttgcctctgcctccagagtactaggattaaatgtgcaagccatcatacccacgcttcaaactcacaatttttaaagtccagataaaaatgatctctataaaacatatatcagccgggtgtggtggcatacgcctttaatcccagcactcgggaggcagaggcaggcggatttctgagttcgaggccagcctggtctacagagtgagttccaggacagccagggctacacagaaaaaccctgtctcgaaaaaccaaaaaaaaaaaaaaaaaaaaaagaaagaaagaaagaaaagaaaagaaaatcttagccactgccttctgctgtaaggaaaccttgagtgatttagaaatgaagcaatgtactgcttatatttctcgagaagtctgaggtcaaggcataaacaatgcctattctctccttcacatatggcacttgttatccatgttcttatgcagcgatatgaacaaggcagccctctcttgtaagcagttagtagaggttataagcccaaggaaaacagatgatcaaatcctagtaaagagccatagtcaatcctagaacactgaagtgtgaatctgacaaccagtgagcccgactcatcaaaatgcctgttctttttacatcctcgttcttctccccactcaacacggtagaatttttggagaatctttttcctacaaagtctgaagtctttcattctgacccgccaaacaatcagaatctcccgtatacattcgaattaactaaccatctgcatcacaattcctaatttacatatgggcagggccaattggcctgtttcccaggatattaaaacaacatccaaactgctacttgccaacacatctttcctgttcttcatcagctgttgctttgcttctcagtaaacacttgtttgtccatctgctgttcctctaaccatgagacagcgactcagaaatctggcagcagtggcaggaggggtgaccctgcccacttgggagtcttttagaagggtgcagtagtaatgcagggcatcactggtaagccggtccttggattggctaccatttcatgctgtccatctatcttacgtacatcttcctgctgcctagtcacgagtatccatgtacttttgcttacattagctttttctttgtaaaacatcctctcttttggctaaatgttttgtctttttattgatttgtgggcatttttagatgtgagcttatttattggatatatttgcatcatacaagatatgtatgtatttatatgtgtagcaaatattctttaccagactatgttcttctcttgatgtcttttaagatatttactttttctatttttaattatgtataggtatatgtgtctgcacatgggtatgtatacttaagggcaggtgccacagaggtgagatatagggtcctctggagctggatttacaaattgttgggagccatctgatgtgggggctgggaaccaaactcctcaatggtaacttttgacaaatttcagattagcagacttttatggctcatgcttttggtgaaatcttactgaaggacttgatgcatgtttattctatagagtaagtcaggagtgtaggaaccatgtggcttgctgctttttttttgtaactaaatctgcatgggagcttagcgcttcccattcatttatgagctgtgtgtggttgcttaatgtgctaacagtccaagaccatatggctgggtgccgtttgagtgtggccattacagaaaaaatttatgaactctcctaaaatattatttcccccatgtttatgcatgatgtctaactggagtaatttttataattttatgaaacatggcctgtaatttgaatgtctttaacatgttattctatagaataagcatgcatcaagtctttcaataatattccaccaaaagcatgagccataaaataatataatttgaatgtgatggaaattttttgtttgtttgtttttttgtttttcgagacagggtttctctgtgtagccctggctgtcctggaactcactctgtagaccaggctggcctcgaactcagaaatccacctgcctctgcctcccaagtgctgggattaaaggcatgcgccaccattgcccggctgtgatggaaatttaacctccaagaatagtgttgcaacactggtgttaaggttcttgggtcatgaagaccctctccttatcagtgcattaatatcggtattgtgataacactgtttgctaaaaaaaaaaaaaaaaaaaaatcctaatcacttcaaattgccatggtacttttattgcatcacaggttactgtttatgaattggcctgtttggaactgttttctgttatactgggctacgtatcattgcactaatacttacccatgtgaagtattgtggccttgtggtaactcttgatgtctgatagcgtaagtctttctgcaatttctagtctatgataagttatttgcattttccatacaaattttagaatttcttaactaatttccacaataaaccctcctgatctcaaatgggattgtattgaatcaagaaattacttaatggtgtggggggcagagtgatggctcattttccaagacagcctactgctcttctagaggtcatattcagttctcaacacacacctcaggcagcttacaagcacttataacttcagttccagggaatacaatacattcttctagcctcttcaagtctctgtacatatgtgtgcacgtgtaaaacacacatgcacacacaaacacatacacagtctaaaaaaggaaagttactatgtctggcagaattgacattttgcagtactaagtacctatccacttacttacgtcttctttaacttccctggagcattttgtagttttcagtttatttatcttgaatgtcttttatcaggtttacttctagacttatgaaaatatggtctcttaaattgagatactattcatataatataaaatttgcccttgtgaccatgtaagcttagtgacttttagaccattaacagtgttagaaaactgttctttaaccctttctttttaaccctagaacatttccttctagaaatattttcctttctctttagccccaccctgtagctgttaatttatttcttgtctccatggatttgaatattgtttgtttcacataagtgtaacatacactatgtagcttgttgtgcttatcatgcttttatgcgcatacaatagcctgattcattttgttctttttttatggctgaataatagtctgttgcatggatatacatgacattttactttgaaattcatcagttggtaaatatttgtgttgttttcactttctgattattataaataatactgctagtatgtttgtacacaactttttatataaacattgtcttagttacttttctattgctatgatataacactataaccaaggcaacttataggaaaaagagtttattggggccgggcagtggtggcacacgcctttgatctcagcacttgggaggcagaggcaggcagatttttgagttaaaaaaaaaagtttattgggggcttacagttccagaagtttagagtcagcattatggcagagagcatgcagcaggcaggcagttacagtgctggagaagtagctgagagcttatgtcttaattcataagacctaataggaaacagcatgggcttttgaaacctcagggcccactgcctgcagtgatgtagctcctccaacaaggccacacctcctaatccttcccaaatccttcccaactaccaactaccaagcattcaaatacatgagattgtgggggcattttcattcaaatcaccacaagcatgtggtttttgttgcttttagacaggatctatgtagccctggtttttctagaactcactatgtaggacaggctggcctagaacttactctgcctgtctagtgctgggattacatatatgcataccacacctcgttcagtatgaattttctttttctttctttcttcctttttctctttctttctttctttctttctttctttctttctttctttctttctttctttctttctttccttccttccttccttccttccttccttccttccttccttccttccttctttctttctttctttctttctttctttctttctttctttttttttttgagacagggtttctctgtgtagttctggctgtcctggaactcactctgtagaccaggctggcctcgaactcgtgctgggattaaaggtatgcaccaccactgtgcagctcaatatgcattttcaattctcttggaaaagtatacccaagaatggattagttatgtcacggagaaagtctatttttaactttctaaggagccaccaaactgtttttatgcagtggctacatcattttctgtactcaataggtctgattttgtacaaaatctaaaatttctttgtttaatctctttagacagtttacaacaatgtttaccaatacctgatttaacttcagcatcttgcttattgtttgctatctaattagttgtttcataggttattttttttatatttttattaggtattttcctcatttacatttccaatgctatcccaaaagtcccccataccctcccccccactcccctacccacccactcccactttttggccctggtgttcccctgtactggggcatataaagtttgcatgtccatgtttcatagttttgttgccattttactgcctattaaattgtttttgaaattcaaatttgtctctactttttgtttcttctttgtaatttttatttgcttactgtatgttagttcatccatgttttcatccaggaagtgctgcattgtgtgtgtatagcactgagcttcatggcaggttattcccagctcttacctccaatctactgttctagtgtttctgtccatgcctttcacctttatacatgttgtaaactcaaacacaatattcctgttttggttctctgtgtgtgcctgtaagaggccagaggttaacctcagctgtcattcctcaggtactattcaccttgtacttggtttttgtttgtttttaatgacctttgttgatgtgcattcatggatggtcagagaatggctcttcggggttggttctcaggcctgctgtcaagggcctttacccaggaagccatcctgttggttccaccttgtttgtttgttggttagttggttagttgttgttgttttgaaacacagtttctcattgatctggaactcaccaagtaggctagactgtctggccagtgagtcctagagatccaccagtctgggtctccccagtgctaaggctacaagagagtgccatcttgcctggctcttttcatataggttccagggaacgagtgcaggccatgtggcttgacagccagtgcctttacccccatccattcaccccaccagtcctgaagaataatacctttgcagtgcagatttaatggcaatgcctttcttcagttattgttgattaaaatctatttcttcttctcattagaaaaactgctccatgtgatataaaatttcaccctgacaaactttccttcaagcacactgcagcttttctcccactgtttgtagctcacataactgccaatgagttgtcgaattttgatctgcatttctctgttcataaaatttcttcttatatctgtcagtctttaccttttatttttggcaatttgaatgtgatgattgcagctggttttatcttgctactcttatttatgctgctcaggattccctgatagatcttgttggctgctttctcattgatataacatggacttgagacactcagcttatgaaagggaaaggctcattggctcatagttttggaggctttaagtcatttggttggcctcattgcttttgatgagttagtacatcatggtggagtcagtggtggaacaaaggagaggataagactgggagttggggtcctgtttcccccctcaatgacatacctcagtgacagaaaggctttctactagatcccacctcttcttcatctgcaggctgccctatggcaccagccatgggaaagtttttaacatatggagagccactgagggcaaattacagtagctattacagatttgtatttccctcctcttctctccctccctccactccctctattttttatccttggactctttaaacttggaccagaggccccaggttttcaaacttgatatcttaaacacgaaagcctataggactagcaggactgagttccattaatcatacttaatcactacagacctaatggcatagagtgccaccctgtcgacccctctccacacagagtaaaacctccactcatccatctgccctcatttgtatgacaggaactgaaaaaaatcacaaataaaaaaatctcatggctgccgggcagtggtggtgcacacctttaatcccagcactcgggaggcagaggctggcagatttctgagttcgaggccagcctggtctacagagtgagttccaggacagccagagctacacagagaaaccctggctcgaaaaaccaaaaaaaaaaaaaaaaaaaaaaaaaaaaccccaaaaaacaaaaaaaacaaaaacaaaaaaaactctcatggcctgcttccctcatattgtacaaaaagaaaaagaaaaaaaaaaaaagaaagaaagaaagaaaaaagaaaaccaaaccaaccaaccgaccaaccttgtctttatctacactgatcagatttagatgaatcctttaaccttttacaattcaaggccaccacattaacatttccctaacttgtttgggtcagaatctttttctgtcaatctgagcttttattcagtttagtcttggtatacatggatgatacagttaaggctcatcttcattgccgtgaaaagtattgtagtctttcccatcagtgactcttactacaaaggaaccaaaacagagcatcctctccaagtctgtttcttttgccagcacgtccctttggtcctcctcatgaagcctccagtcttccgcggcacacggtcacgtggtgggtgttcatccatttgctactgcctgacagtgtgcctttaacaagctgttctcacttgccacagcaatcctgacattgtgcttcactcttccttttccatccttctatatgacacctacttaacaagttcacagtctcttgagtgctttgctgtgaatgttaatcccacatattaagatttttaaaaaatttacacatctccaattttctagtccgtgagatgaagaacttcaggatcagtcttgtatagaccacccttgctcttccagcactcctggctgagctgtacaagttcttctcttctcactgggtccacgtggccccaccctggttacgctctgaccttcatcagaatcctcctaaaagcacttaccttattgtttctggggagttgttgaacataccctgtcttaccgaggagagcttcattttcttaaagcagttgaaattggtagctctcaatagggatgctctccttactttggcagacttatatgttttaggcgaatctcagaattcaagattcttggggatatcaagccaaatattccaagtatcatattcagtacacataggaactcagttgtagtagattataggtttcttgtttgggagttgaacagtttttgaagagaatcactaatagttacattttggaaacagagacacttcctatgctgctaagggggccctgtggcttttcctggtcttttaactgcttgttagttgctttcagcttttcatcttcttacagcaccagtccaggttagctttagccatagaaactcattgtccctgaacccatattcacatgtatcagatatctcaatctaactatgctagtcatccctgttgagagctggtagcttcaacagttgcaaagctggatatttatttccctcaccatcagagagagtggccttcctatcaaagctatgtgaatgatgcgactccaaatcccatcatcttacctactttcctagatgtctccagtataaatcctggttgggcttccttgtttccctttgtcctacatggtcatttgatattctgtgtatgtgaactcaccttagcctttagctgacatacatcaagactgttagtattccagttaactatgttctgaacgatagcaattcaaatattgtcctccctaatgttttcagccagtaaatagttaaatcagcaattttgttttgttttatagtaaatcaattcatatttctttaacaaaatgtctcaggccaagtggtggtagtacatgccttaaaacccagcacccacccagccagaggcaggtatatctctgagttcaaggccagccttgtctatagaatgagttccaggatagccaaggctacacagagaaatcctttctcaaaaacaaccaaccaaccaaccaacaaaaatacccacaatgtcttagattacaatttataaacaatagaaatgctgcatcaggctaagtgtgcaggcaaaattccactgcatatgaaataaaaataaacaagtttattttaaaattcaaaaatttcttcaccaccactaacagtttttctcattcattgcctttctacattgattttcttggtgagaatctatcctgtcttccttttaactttatctaatgtgttagctctcaacttagttgtaatcttccatatttccattccagatttcacccttatgtgcctttttccaagtcctccagataaactagctcactcataattacctgaaaatattgtttttctagttcttctggttttcctgagctgtttcttcattcagttcttaaccatggataggttataaggtccaggacttaatcacttaacacaaagtcattttctctccagtttagaccacttttgaatgccagagtattttgatcctttatagacttttatagtgttcaactataatattataaaacatttagaaaataaaaaaattcagaatagattatacattttaaatttaatgtaacatatttgtatgtgttggtagtttacctgcacgatgcacccaatgaatgcagtacctaaagagaccctaaagagaccctaaagagatcatcagaccctctggtgctggagacaacagttgtgagctcccagactgatgctggtgattgaacctgggtcctctggaagagcagccagttttcttcaccagagccatctctttagccccagattatactttttgtttgtttgtttgtttgtttgttttgacacagggtttctctgtgtagccctggctgtcctggaactcactttgtagaccaggctagcctcgaactcagaaatcttcctgcctctgcctcccgagtgctgggattaaaggtgtgcactaccacgcccggctcagattgtacatttttaaggagaaaaatgacgggtttgtttttagggaggatgaaaatacttttagtgaaagtgtaaaggggacaacgctgtcaaatgaatgatagttaaaatagcttgacttgtctgtcgcctttgtgtgtgatcccttgaaaagaaagtgacttctgaaaatacaagttatccctgagaaattttttgtctccaaagagcaacgatattgtgtaagtctgaaacctctgaagagaccgtaaattttcctattctctaaatttagacccatcaacagtaatgtcagtcagccatttactttaaacatatcaaaacgagttatggtaaagagactatccataaggggatagatctcatcacatataagtgattcttagaaatatgtaattgattaaagccatgcagtaattattttactaagacaagtgaaatgcctagcatatagggaaccatatatgtgaagtctattaagatactctaggtcagaggtgttgctggtctgagcagggttaagtggaatggatggtcttgttgtggctgtatagagtggtaaggatttgaaagctcaacaatgagtcaatggtttttgcccttcagaggggggccttgctatgtagccttcattatcctggaacttgttctctgcctcacctccaaagttctggaattacaagcatgtaccaccacactcaaatcatccttagagggctaagagggtctttatgcaacctcaataggcccatagattactttgtggcaagttggctacctgcattaacttctatgtttttctttatttgtactattaattgacaagcaaaaaatatttttgagacaaagacaatgtaatcctggctggcctggaactcactctgttgactagattagcctggagttgggaaactgatgttgggattacagacatgcaccaatgcaccctgtggacaagtaaaattttttggatttatgttttgacagacatagatgaatagcttaatcaagctaatttataatgaattacctatacacttatttatttgtagacaacacatacagtctattcttgtagcaacttaaaatactgtagtattctattattaactatagttaacgtgacacacagatttctagaattttccttctatataactgaagtttttatatcctttgaaaacatctttccaatcccccaaaccttagattgtaaatcctttctcaatgtggctgctgtgggtatgggtctttatttctcgtagtgccttgggcagctataccctctgtgggtgcatagaatttatgatttagtgatttgagatctcatatcacatctccttagagcaaaagacacttcagatgagatgaggcaatttttttaggactatgcaaatcagtggtcctattacacaacctaccaccagtaaactaaggctatcaaactaagcatgaagtggaatgaccctgggggcttatagatgacttccaggagagaaaacagaagtattctttagcatattgtatatatcttcagattgtggttagtggatggtgtttgtcccctgaaactaaaatactagttttggtgacaacagatgggaatagcagtgtgtctatgcaacataaccctgtttgttagctgtcttgtcaaaatacctgacaaagaaacttagggatggaagggttaattttggcttgcagtttgagggtaccatccatcatgggaagaaggcaaggtggcaaaaactggaagctgctggccatatcatatacacagctagaaagtcctaagcaatgatggtggtgctcagctcccttctccttttcattcagtccaggccccagcttgtgggagggtgttgcccataggtaagatggtaaacttcccaccttaactaacctaatctagacaacccctcacagatattccaagaggcttgtttcttaggtatttctagatcctgccaacttgacactattaaccatcactccccacatgaatcacttggacaaagtattccagtttttgtagtttttagagtctgtggattgaaagacttctgggggaggggttccttttacaaagtagatgctttctaaacataagaccatagctgcttcttggtcactttggacaccctctccctttatagcagctgacagataaaaagagcagtgaactaatgagcacaatggcagggatcattggccttggtcatcatgaagaggtgatgctcatacatacaggggcacgaagaaatgggagtgtattcaggtaacctactgagacagttcttatttctgtgcccagttttaacagttcggcaatcacaatcttggagggcctaagctttctgagtattggagacctgaaatatgctatcagataatcctagaccatagaaaacgcttgtcaggagaaagatatttgcagaatgataggtagaagaaaatgcccttaatcccaagatgctacagagtggctcatgctggctcacagctgcattcaactcatgagaattacattggtctgttagttgcctcacccagaaatacctgggtgatatatctagtcttctacctatcactgattcagaccgtgtgacccatagctcatggctcacaaataggtgagctcaaagccccttgcatcaaggaggataattccaaggctcaggcatgcttaagagcttcctgtcaggttaggctatggctaggctagatttcaggttttagatatttctttgtttcaactcttctatggtgctgtcctgcctgctgtctccctgcctgctgtgtcccatcctgatagctttctcccaagaacacgccaataagtcatttgtatgagaatcctatgtcaggcccttgtttctaggtccattctccatctacaaagaatactaggggaacagtatatacgtgcctgttatgcggcatagaataaactttttcccaggacaggtgaggcattttctctcacctaccaggagatgacccctggacctatgcttagaagcaagtgactatgaacatttctttttttttttttttttttttttttgctatgcccccatttccactttggggtttcactttgcatttgtttatgtaactaaatgttgaagtgctggtctcagaactaaaattcttcctggcagttctgtccttctctgtggagatttttcccccttctttgctttaatagttcaaatgtcatggctcaaacaaatgtctgcattttgtgcttcgccttctcttcaagaagtccttatcccaagccctcaggtaagggagggcatgaagcatcaggataagctgagatgtgggtggtcgggggaagtccctacttctgccctcaggctttgctccaagcttcatgttttataaagttgttatttatcactgtcttagctggagttttactgctgtgaacagacaccatgaccaaggcaattcttataaggacaacatttaattggggctggcttacaggttcagaggttcagttcattatcatcaaggctggagcatggcagagaccaggcaggaatggtgttggaggagctgagagttctacatcttgttacaaaggcaaacagaagactgagttctaggcagctaggatgagggtcttaattaaagcccacgccgatgacaacacacttcctccaacaaagccacacttagtccaacaaggtcacacctcctaatagtgccattccctgggccaactatattcaaacctggctcccatgggcatgttcaaacacatgaatctatagaggttgtacctagccatagaaaaatgcgctgggcagtggtggcgtacggctttgatcccaggccttgggaggcagaggcaggcagatttctgagttcgaggccagattggtccacagactgagctccaggacagccagggctacacagagaaaccctgtttcaaaaaaaaaaaaatgcaaaatacagttagtccaccttccaaagttccatagtctataacagtctcaacaatgttgaaagttcaaaattcagtctcctaagattctacaatcacttaactgtaatctccaaagcaagacagaaaaccagctgggcaaactccattctctgcatgtccatatctgttgtcaaagcagtcttcagatttccaactcctttttcatctttcttgactgcaacaaagttctttctcctgggttggttccactccctgttagcagcgttccttagcagatatcccatggctctggcatctcgatcatcttgaggtctccaagacaacttcagtgttacagcttcttgttccagtgtttgggatccacacatagtcctttgggctccttcaaaggaaggagctttgccctccgtagcactctaggctctggctgactcttccactgctgctgctgttcttggtggtcattccatggtagtggcatcttcattacactggagtcttctgctacaattaggcttcatcaatagcttctcataggttctcctcatggtgccaagcctcaagttctttgcatgactccttcagtcctaggctgtcaaatgcaactgaggctgtaccttctaatggccttctatggcctctcatagtgccaagcctcagctgctcttcatatcaccttcatgccttcaaaaccagtaacacctggatgactcttacacattaccaagtatagctgcagcacaaggtacaactgtggctgcctctggaacacagcttctttgtgctttcagaaaaatacttcccagaagatttcacctcagtgatgctgatctcttcttcatcaccactaatttcttagcttcagctaaccagcaccaattgtcccagtagactcattctcctcttgaatataaagccagagccaaatgaccaaagctgctgagttctgctgcttactggggctagaacatggcccctttgttatatttcattagcaccaacttttggttgttcagaacttgctctgtcaactatgaacatttgactactctttttttttttttttcctgagacagggtttctctatgtagccctggctgtcctggaactaactctgtagaccaggctggcctcgaactcagaaatccacctgcctctgcctcccaagtgctgggattaaaggtgtgcgtcaccactgccttgctcatttcactacccttattgtaaaatagaaatatgtatattacttgtatattactaccatctagagttatgagagtattatacaaagtgtatggaaaaagtgtttgacccaaattaagtacttagtaaatgtagctattactaatagctttcataattggattctaaaatttaactcattaagtatcctaaaggggcacctcttggcattctatctggatctgataattaaggtgcagaaaatactccattcgggatgctccattctccctaggtcatggataacttcttgaggaccaagctgtttaccagcatccacccttccttagtcctgttcacttaacggcactctctatgtgagaaccattcagcttccttgtttctgaccatcttgccaacactgattttgtctttctctccaagctggaagtcttttgccagttgaaagcagagcagtttcaacatgagattaattttttctgctcaaaggctaagttttgtatgcctggggagatggttaggttaatcgtcagcttagcagaatctagaatcaccagggagatggccctctgggcatgacagtgtaggattatcttgaatacattaattgatgctccaagctccatcatggttgttggcagtactgttccctggcagaggatcctgggctgtataagatggagaaatggagctgagcactaagaggtattcatcactctgcttctcgacagtcaagcaaagtgaccagctgcttctggttcctgctggcttgactttcccaccgtgatggactataccttgatcagtaaaccaaaagaaagccctttccccttgagttgctgttttcaggggaaaggaacaagaatcctgacttttcacgtcttctcacctctccatgttatcctaggccatgtttataggatctctgcctaatcctcagtttattactcagaactcaagctcccgatggggatagggatgatggaacagaggcctgtgggagaggatgctaacagcctttgctggaggggctgaagccagtgctccacaaacacatgcttttgttaggcgtttgcttctgaaccctcacatttctggcctttctccatctcctattttgtccgcccaggcctaccggaacagattcagtgtcaatctaagttggtgaatttgccatatgaaccctggcttgctaccctgtgacacaatcttgtaactaggtcagtttctcctcctgacccacccaggactcggctcccagtagagctcagaacaaagctcctactggcttcagctctataaacagcctcctatttaatgccccaaagaacttgggctctgtgctgcattactcgtgtgcttttaaaatctcctaatcacctgattttatgacagacactaatttgtttctgagcttcagattccatttttgttttagcgccctaggaaaattgctcaagttgctttaattagtatcaatttggttgtcagattttcaagatgaagccattgtgttcaagcattatttaagctagggcattaaaattagccggggatttttttttcaggaatcactaattatgacccaattttaaatgtaacatttaaaaagaattattaataagtctatatcctatctctttgggctacaatatctcatagttatataaaaagttaattgctagccaaaatttgtatctcttttcactgtgtaaaatatgtcaatgcaattgtctgtattaaaagaggaagaagttgagtaattgcaaagtaatttatatttatctttggagtgcatgtgcccttagatttgaatatgtctgagtctgatgtctagggaattcatatcaaaataatgaagctgtgttaaaaaaaaaatctcaagtcaggagattgcttccctttttgttgctttcctgggttggaaaagaaagctaaattgaatcccattcatcttcagtcgatttgtatgttgaacacagatgtgcagaagtgaagtcgttggtctgaaaggaattcaggagcagagtaaaaaatatgttaaaataggaacttttagatctctgttggattagctggtaaaggcaaagaaggagaattaaaaataaagaaatgtagaaaagaaaaaaatggttttgaaaaatcattgcagtattctgtactaagaacagggaggcagaactgcccaagctttagaccagagtggatgatatctgttcgcttctttctgtatactgtgatctatacagatagaagatgaacatggagacaaagaggcaatagtaggttactgaagtttaaactagtatttttgaaaattaggttttagattgtggaagggcatcttttgatgtaatgataaaaatatatcatgttttggggctggagagatggttcagcagttaagagaaccgactgctcttccagaggtcccaggtttggattcctagcacccatactgacaactgcagtaaatgacttttctaattgcaagtacctaacattctacccatctaaaggaagtatttattaatgcattgttttcttttcctaactagaatatacatgctctgagactaggtactgtgccatagatctccatatttaggaaaatcatttggctcattttagatccatcttttaaatgaataaagtacattaaaacaaatgtatatgacaggactgttatcagagaggcttcacccatcaactaatggaaacaaattcagagacccagggaaacattaggcagagcttggggaatcctctaaaagaggagaaggaagggttcaaggacacctacagaatgaactaatctgggcccataggggctcacagagactgaacaggcaaccagagaacatacatgggactgacctaggccctcatatgtgacagttgtgtagcttggtctttgtgtgggacttctaacagtgggagtatgggctacctctgactatatttgcctgcgtttgggaccttttctctctactgggctgcctcttctagtttcgataggagaagatgaacctagtcttctataacttgatataccagacctgtttgatatccatggaaggcctctttttctgaagagaaagagaggaagagtggatgggcatggggtagggggaaaggattgggaggagaagagggaggggaaatgtggctggatgacatgtaaattaattaattaaaaataaatgtatgtatatctttaggtttctttcaatattctgaataccaaccacatagctgtctgatctcagccattttaagggcttctcaacttgttcccctcgtgttaattgtgtgagctatgtggaataattatgggtcacattatgggtaattgtggtttactttatttgtattgcagctttacaaaaattatttgagatggcaccaaaattattatagtggatgagccactctgcttgctttctcttcctcctcctagaagtacttctctttaaagtttcatggtgtggggctagaaagatagctcagcagttaagagccttggtgttcttgcacagcacccagactctgttcccaggacccacatcaggaagctcacatccaactataactccagctccaggtaaccaaatgtcctcttctggcttctttaggtactgcacaaaatccatccatccatccaggcaaaatatgcatacccataaaataaataaaaaataaattaaaaaaaagtttctatgaagaaggaaaatatcttctgggcaggatcaggtagtttttgttgcggccatgagggtgtatccaaagacatctggtaaataagtcagcaactggagggtcaaaacccacccgaggatggtacttcctacttcatctggaagtagggaatggccagtgaatgagtgcaagcttgatttctcctgaatgaacctggacttggttgctgccatcactagtgtacctttgaacttgaactcacaccagcatctccagagtttcagtggtttcttttttctgaggcttctagcttctgagactaagcacctctagctctttggcctatagatagtcaccatgggaccatacagaacctgattaggccaatttcatgtctgtctgtctgtcttcctacctacttttccattatactgcttctctagagggccctaagggactggggagatagttaaatggttaaagcactttctagaagcttgaggaccaaagttcagaccctcagaacccacgtgaatgctggggaggtgtggcagcctgcctgtaattccagtctcatggacaattatcccccagagcaagctggccagcaagattgtaccagcaagctctggatttgattgagagtccctgcctcagtgaatgagatgaaagtgtatgattcaggacagccttgggcctctataaacatgtgcacccatgtgcatagacacccacatgtgcatgcacacacacatggaaacatgtaaaaacatgcccaacatggagggaaatgggggagagagagccgattaacctaccaggcatgaaaatggttagaaggtcatgaatgcaagcagctgcacaactgccctagttttctaaaaacaaactccactgggatttggggcctgggtctccagcagaagagagagtgtgtggagagatcaagccaagggaaccaaatcagtgagagtcacaggtagaaactagaaagaggccagtaatgttcctcgctgcttacaggcttcgaaaaggacatgtccctgccaagaccaggatttcgcttacatctcacccctaggactatgagacatttgtgttgtcttcagccgccaattagtaatacttgttaaagcagcccagaatttttctacttttaaagaagagcctccctcatcccaatggctttgtgaagagggaatgttctgctgactttgcatgagttttttataagtgctgatagacttaaaagatggttgctggtgctgtttaggatccctgtgtctgtactggtgttctgtcacgtgacctgccccttactgtaagaggcatgttggagttgccatctgcagtactggtatgacagcttccccttgcggtttgtagtcttactgactacagcttgacaattctgcattaggcaaatgaatgctaaggattagcattctaatctaattctccttgaagaattaaggttttcctccctatataatgttcctctttgttcttaataatttttctgaaatcatcttgtttaaagtgaattggatactgtagcttaattttggttagtgttaagcatggcctgcctttctctagcctctaactttaaaaataactcatttaaaaatgctttaacattttgatttattcacatatttaccattcactgcacataaagtgtactattcactgatttttaataaatttagggggatgtgccaccaataccaatctattaataaaagaattaatagattatctacatagctactacatgatcactgacagcacaaggctcaaatatctccacatagtccctcatttgttcctgtctccttttagttacagtgaccttagtgcgtaggagagggtatcttacactggttttgggtttcatctatctgaagacccacactactgagcatctttttatatgttttagttatctgtgtattgtctttggataaatgcctataaaaggccccttagtggtttttttgttttgttttgttttttgtttttcaagacaggctttctctgtgtagccctggctgtcctggaactcactttgtagaccaggctggcctggaactaagaaatctgcctgcctctgcctccctgagtgctgggattaaaggcatgcacaaccatgcccggctccttagtgtttttctttttttattctaatcgttctttatatgttgttcagacagttgcttatttttctgggggcatagcaaaaaaaaaaaaaaaaaaaaaaaaaatctccgaattcagacaattcacacacatggtgcttatggataggttttcatttagctatgatgtggaattcctttttgaatctggtgtgaaataccaaccgtagtttgttcttttatgtggggacatgcaattgcctcccattggtgcagaaccctctattcctgttgaatgaccttggcgtcctttaaatgggaaggcttatttctagactctcagtttcatccccaaacaatcagatgctgccctgtgttgccctgggtcttaagcatgagatcatttacatctcagttactaggtgctgttgatgctattcttagtcctgccttgcagaggaagtggtttatatctgtgaatggtatgtctggactcaaacatgcgccaaaattgactgcctgagctcttagccgtggcgtgagtaaatattcacaatcagaagtatagaacggcactgaaaaatccattttagcaaaaactactgtgagtgggattggcctactgggctggagaaacactcccagaaaggggcttatacttgcgtgttgtctgcgtggtgggctctgaaacccttccatctccagacagaggactcgcaggtttgtggattaaagcgctagtctcaatgggtgaagggaacccaggagctgctggtcaaagcctatgcaaaagctgttcgaggtggagacagaagaggctgccctttggcgggaggctgcccgagacctgagaactctcgcgggaagatgtacggtcaccacggcaaccgcatcgccccggggttggtaaagatggcggggcgaagtgttagagtgccggtgagttcaaccccagactactgaccagtggttgggctgcgggctggcgggcgggacggacggacaccggactctcttgaacttgagctctgcaactctgtctgcagagacgcggttctgcaggtacccagtcgcgcgggcagcttgcagctggacgggacctcctcgcccgggaacaagagtacaagtgagcatccctcatatttccagggcggttactggggtgcctttcctgcaggttggctgcatatagggaccctctctttctcctcattaccccttagccttggctctttcacagtagtagcctgagaaaatatttgtaggggcaaaactgtagtccacaaccgtgttggaaggcaggagggttcacatggaagtggcttggagcacaggaattgccgccgagagggaaatccccagattttgaggattctcaaagtactagagtttactttgcacaaatttcttggaggcttgttttccaaatgaaaagctcctgtctatagtggggtcctgtgtgtgtgtgtgtgtgtgtgtgtgtgtgtgtgtgtgtgtgtgtgtagaagaatgatatcccttccttgtcttgttctctgacaattacaaagctcttgaaaacacaggcttcacgatgtctgcctacccccactgcccttccccaagtttcttgcagaggccagaacgatcttttcattttcgtttcattgcactgcttggaactgcatttagttgttgtcattgcccctgcaaagttttggcaactctggcactttcatttaacctgcgtgtcggctcttacatagtgtggaactcttcggtcacaagggacgtgggtctttctttcctctcttttcgagggaatcacacttgccttcggactgtaaaactcagaggggcctctgacagtgctgatcagggccctagttgtttaataattttttttgcaattagcatattttgttaaaataaactcacatgatggcttttttttctccccgagacagggtcacgacacagctgtggctgtcctggacctcacagagctcctatctgctcagcctctagagtgttggcattaaaggcatgcaccaccatacccagcaatagtttacttttctatattctgccgcctctcctggactctgaactccaccagggcagagattatgtctgctttatttgccattttatttaccttttttttttttttttttggtttttccagacagggtctctctgtgtagccctggctgtcctggaacttactctgtagaccaggctggcctcgaactcagaaatccacctgcctctgcctcccaagtgctgggattaaaggcatgggccacttcgcttatttttttttttaagtatattttaacttttaaaattgaaagcatttaaactagcttgtttcaggtacaacaagaagaagatacgcatttcagtagtgtgaagaccttcagcactgctctgctgtggttcatgctgtagagccctgtgaatgctggtggagaccaccatctgctaattttgatagtgtgtcttctgtgtatgcctttttccctgtttatgacaatgaaaagtgaaatacaaacagtaaccacaagcagctgtaattttgaagagctcacattaataattcattattttattttaggtttgctccaggaattgggtagatagatcccttttaaaataggctctaaaaagttgtttgctttgatttctaacttgactaaatgtaatttttaaaaattttgatgtagccgggcgtgttggtgcacgcctttaatcccagtacttgggatgcagaggcaggtggatttctgagtttgaggccagcctggtctacaaagtgagttccagaacagccagggctatacagagaaaccctgtttcaaaaaaccaaaaaaaaaaaaaaaaatttttttttttatgtaaacttttctccacactttaattcaggtcataaactccacatggcagaggagtttatggcaggcagggcacctcggtaggtcaggaaacacagagttcaggcaggaagtgaggctggactgtaaggctaagagacctctcctggtaccctactccaaaagctacacctccctaacagcaccacaggctgggaacccccccgggggaagttaactttcaaaccataacagtctgtcccttctcctttcccctttttcaagttagaattctgattacaaatttttaatgtgtttctctctgtcttttatggtgtaaatccctcctctcccttcttgtgcctgcctgttctccctggtggctaatgggatgtgttattcttttaaagccgtcttcggcagggctaggtttcagagcccttaccttctagatgagaaaatgtcctcgtagcctggctgtgagtttctcctactggcttacctctcttctgcactaaagttggatgaaggttggcagcctgactctgaaccgcctgaacccctcctccatgtgtttgaactccagggtagtccttctccacctcatcacctgaggttgtgggcagagtctttatggccacttgactcacatgcacactgagttctcaatgctggggtgttgtggcttctattcctctgtgtgacgctctcgtagaattttgagtcattcttaattcgaggccatttcctttgagcttgaggttagtgattatttctaccattacattttatctctcattttaatgaatttagagtagaaaaataggcttaatcctcttggttgacctgcattgactctaagtttcaatttaagtcctcctgattattctaggaaacaattgaaagtcactttaagtatagtaaatctgtttcttagatacttctcttttaaccaagtaattcttgcaggtgagactgttttaagaaaggatgtggtgctatctgtcctcccctccccctcttccttaggttaggggttagagtctcctgttactttagaattatgggccaatgagccttcctgagaactccttgacagaatttcagccatggttggaaatgggatccttcaataggagaaaaagacatatatcatagtgtgaatctttaaaagggaaatagacaggaatagaatgtaatgcactaggctaaatgtgctctctggactgttgtgaacccagttaagatgctgaccatgtgaagataaatatatttcctgtttctgggtaaatacaaacttgtgtgtgtgttatagataacagttgggaggaaagattaaaaataaaacaggttaaatgataacttcccctttcaaacattttccttataatcattcatgctttttgttagagtgcaaatggaggccaaattagtcccacatttatgatgatattggtagtgaagtgtgtggctgagttgtaagctggctccccaaacagagtagcaccctagtccatgtaggcttctgtgattctggccaccctagtcatcatcagaagagcagccctacccctcaccccctctcctgtctctaaagactcatggttggaatttgtgttctccagtggttagtcctggagctgagttgaaattacccagtttctcttgcctaacttgctagtctgatgacttacttcagaagacattagtgaagggccatgacaggcagggcagtactgccatcctaccggaagtaggaagaggcagcgcgttctagtagctgggtttattttagaataaaaatgttgtgtgttttggcatgcattgattataatgtacttgcccaaatataattacttttatttttgttacaatttgagtataacccaactatcacattattttctgcttttaggcgtttaaatgaagaattggaggcaaaaactgctgatctggttcgacaagctgaggaagtaatagtaagtagatgtacagtttccccctgtgagtgctaatttttaactttaaatctaatgcataacatgcatattaaaaatacccaaagcatcaatgatcagctcactgggtgacaataaacaagagtgtgtgaacagggatggtttctagcccgatgctccaaccacatagccagcaacaagaacattactgcggtaatcttttccagtaccaaaatagaagtaccatagagttctaatgtgttctagctgctcttagtagctgagccattcttcacagtcaatttttttaaagatgtatttatttatcatatgtaagtacactatagctgtcttcagatgcaccagaagagggcgtcagatctcattacagatggttgtgagccaccatgtggttgctgggatttgaactcgggaccttcagaagagcagttggtgctcttaaccactgagccatcttgctagccccactgtcaatattttattttgatgcttcatataaatccatcattatttattagttgaggattaagaaatataggatctataacatttcacttaatagataataatctcagaaatactagttggcatttgtaattattttactggaaatactttaactttaagttttgtatctgaacagagggaaacattttcccagaagaacagcatgtcacagtagaacgagaggtgcattttctatacgcttaaggagtcccctaccgagaccctccatgtccacccagaaataacagtctagaatactgagggaggctgggagggggaggggctgcttattattcccagaagcccactgaacggaacgtctgccatcttcagtgtgcatttactgctttgttgcttactggctcctcaccagaagtttccgctccccagcctcacacggatttcacagggtctaatggctgcggcagccttaccactctcatgcttttatctccagagagtttcataagctggaacgaatgaaagaggagtgaatccgtagcagttagcactcacttgtgattgcacagcattcctgacactgtcgaggcctgggcagttctggaatgctgagtgttccgagggagctaagctcagtcctggcagtgttgttgtgagtattcatggtttgtcttgtttaactagagagagcagcaagaagtgcgagccaggcctttctcagcactaactacatcatgcaaagaggaaggtggttccagttcgaggtacgtaacttcagttctcagttgcggctttctttcagcgatccttgtaaatctttaatgtataaaatctttttgaaaatgttaataattcaaagaagagtataatatatatgttgggccttataagttagattcaaggcacgctcttaacctgttttatctcttgtaactctaggtttttttttgttgtttttttgttttaaagatttattaattattattatatctaagtacactgtagctgtcttcagacacaccagaagagggcatcagatctcattgcagatggttgtgagccaccatgtgattgctgggatttgaactcgggacctttggaagagcagtcagtgctcttaaccgctgagccaactctccagccctctttcttttttaaaaaaagatttattatatgtaagtacactgtcgctgtcttcagacaccccagaagagggcaacggatctcattaaggatggttgtgagccaccatgtggttgctgggatttgaactcaggaccttcggaagagcagtcagtgctctttactgctgagccatctctccagccctattttcttaacgcagctgtttcaataggtggcttttatcatgtgaaatgtggcatttgattatttttgaaaattattaaagatgagagacaattctgtaaagggaccatccatttctcttcagagtagtaataacttagagatataggccgtgagttctatgataggtcttcaacacctatggttgctctgtcagaaatacagtaaggaaaccagagtttagtttaacatccagctgctctagtgtgctggaagcaaggctgaccacccaggccattccagtcatgcatcggacaaaacttcatgtgagtcagagcactgtcctgcagcgcgtcttgggagggagtgggccagcagaggcagcatgtctacttcacgtcatgggcagctggcagatgtttttaaaatgctctctgtttttatgtttatttaatttttttgactatgtatttgggtgaggatgtctgtgcatgtgaacgttactgtatgtgggagccagaggcattgggttccctggaactggagttgcccaacttggttgctgagaactgaactctggcctagtgctctagcctctgacttccctccagccctggtagatgttttcagttgtgtacgtgtgtgtgggagtgtgggtgtggaatgggatgggcagtgcagaagcatggtgatgcctaatgaaatggtaggtgtacactcaaaataaggacacttcgagatacttatgtataattttagaaagatttgtgtgttgtgtgtgaaaaaggttactttccataaatttaaaatattttgaaaactacttttctagtatatatgatctaattttatatactttcatgttaaattgcaagaaacctattcatggccaggtcactaggtaacgtctgatggaaagctgttttattttgtgtgtcctctactgtggccagtcattctaggggatatgatggcatttccctcatgtagcaatggataataacacagtgtgctccatgatattaatatcgatgttccagacagtaggtccggggcaggtgagctttccatggagagggccaggtagcaaatgttttaggatttttgggcttagacagtctctgacacaacttagatagtctctgttgaagagtgaaaccagcataggtcatgagtgggtgggcgtcgatgtagccgctggtgagccagtgtatgtatacacctacagagatgcctcatcctaagctacagacacaactaagccggagataaaacgttaggaaacaaagtggatttagatttatctgttctcttatttgatgcctgttacttgatgtcagtttaaaattttacatgtgaaatctgtgccaaattcaaagcattcaacaatgagaaaggcaggctgggccctacggtcatgagtccataatgttaagaagagagaccctgaccaagtgttcaagtgcacttgaatggttgtggtgagcatggttataagtaaaagtgctgcagtgggttgttactagtgcgtgtctctgtgtgtgtgtgtgtgtgtgtgtgtgtgtgtgtgcacgcacatgtgtgcacgcatgcctctgtgtgtgtgtatgcacatgcatgcatagacggagatcagaggacaacctgtcggaagtagtattctccttccaccacgtgggtgttgcagataaaactcaggtggtcaggctcagtgcatttatatgctgagccatcttgccagctctgactcatttaagaaatgggtaccccttgttatgatttacactaataaaaacttgtacattcccctaaaaggatattgtcataccttctctgtagtgaattacttaacctgagcactttttacttgccattattcaaagtaaattaatgtctaggaactagaatcaaagtgaaatgtaattccctgtgtatatataattattaaaatatatgcatacatctagatgtaagttacatagaaatcaacttataaatcatgtcacgttaatgtattgctagctggaattggagcaatgtttcctctttaggatataattactgttgaatttcatggtctttcagcgtagtatcatgtattttaatgtagtgcttacttttggtttgtagagatctgttgtcatctgaagggactcatccatggacagaaaccaaggtatgaaggcaaactttccataaatgcaatcacagtctgtacaatttaggatgtttaactaaaaaacaaaacaaaacaagatttttatttgtgccacctcatgcatatggatgtcagaggacagcgtgtggaggctggtcctccccttccaccatgtagaatctggggattgaactcaggccattacacttagcaagcatcttatcagctatcttgctggttcctagggttgattcatttgattgtttgtttttaaagacaagtaggcaaagagtatgactcagtaaacaggatgtaaaccttagtactcagctgtgatcacttattcagcattgcttataaagagatcttgggcaatttctgtcttgtaatttcactgagtaatttggagaatagtgaacagttctaaggaagagactttatagaattaggttattgagtctccatgaatcataatccttaaagtcacgcaggtcctcatccagaaagcatggcacagagatccatcaggaaagtgggcttcctgggatctccaggtttctatccacaagggagctgtaaatttcaatgctaggaaaggcctgcttgccacatggttggctaatgaggggagctgcattctatgaatcaaagcatccttatttaatattcactacctggctgattgcacatgcatctttggaactcattttctgtattcctgattctcttggtctgggtgctgtttaggtctttcttgcatagttctgggattcctgaaaatgcagttatataaaaataccaattcttatttgtagcaaaataacaattgcatatgttacaaaattttgggggctggagaaaaggcccagtggggaagagcactgactgcttgtccagaagacccaggtgcaattcccagggcatacatggcagctcacaactctataactctagtctcaggatatccggtgccctctcctggcctccaaagacactgggcacaatgtggtacacagacatatatgcaggcaaagcactcatatctataaaaaccaaaaaccaaaaccaatctgaacaaaatttctgttgttagcgattattagactttggcactggagagatggctcagtgactaagagtgctgactgttcttccaaaggacctgagttcaattcccagcacccacatagcagctcacaactgtcttaactctagttccaggggatctaacagcctcacatatgtacaataatgatatacagataaaataaaaagttttagaaaatcattttttaaaagatttatttatttattatatataagtacactgtagctgtcttcagacacatgagaagagggcatcagatctcattacagatggttgtgagccaccatgtggttgctgggatttgaactcaggacctctggaagagcagtcagtgctcttaaccactgagccatctctccagcctctaaaaaaaaaaaaaaccaaaccattttttttttttaaagatttatttatttattataggtaagtacactgtagctgtcttcagacactccagaagagggagtcagatcttgttacagatggttgtgagccaccatgtggttgctgggatttgaactccggaccttcggaagagtagtcgggtgctcttacccactgagccatctcaccagcccccaaaccattttttaaatgaagaaatgattagacttttagttaattatagtttcaattctttttctctagccaaagaccaaaaacactggtcctgtaaacaagattcaaaacagactccactctgcagataaagaaaggaaaacaaattcaaggtacagcacagtttgacacgtttgagtctgctcttctctcctgcggctcacagtgtctgcattctccgttatggactttctcttctcccgagttctataaagctcccactacaaagctactgcatcatactcagtaatgcagttagtaaccagtctgtgttctctaaaacaaactcactaccttctcatacatattcctgccattctaatgagacactattgaaactgggactgagatctgggttttgtttagagattttttttaatgtgtgtttatatgagtgtttgcatgaatgtatgccatgtacgggcaggatccctctgaggtcagaaaaggtcagattccccagggtcaccagcagttgtgacctgcacttaggtgctgggagccaaacctggttcctctgcaagaacctgctcctgactggtaagctatctttctagtccttggacctgggtttttgagtcattctgtcaggttcttgtaaatggattaaattgtcttctagttctttacttcttgacagatgccatatatttagtttgtgagatggatggaatagttcgatatggtataaattagattgtgtcaaaattttaacttacaatttgctgttttttgttgtttttaaagattatgagactacctttaagatcataaacatgttttcatgagactggcttttttttttttttttttttttttttttggtttttggtttttgtcttttttagacagggtttctctgtgtagccctggctgcctggaactcactctgtagaccaggctggccttgaactcagaaatccacctgcctctgcctcccgagtgctgggattaaaggtgtacaccaccgccgcccagcttgagactggctttttttataaaaggaaaagagtttggatgtaccaaccagtaagcaattaaatctttgagtctacggtttacccaggctggtaattacattataataatgtggaaatctttattaacgcttgtgtcttttaattgcttcaaagggaaaacaatagaattgaaggagcagaagatagaattaataaaaaccagcctgaagagatcattggctaaactgcatgttccactgcaggattaatgcccttgtcctggcctcccagtcagtgtttaaataaagggggtgactgcaagagcctaggagcatttgctgtcctgttaaacatcatctgggcttcagagtcacagactgggtgacatcccagtgtatttgacctggtccagtctttcatgcttttggaagtgagtttcattccctaattctttctccagttaatgttaaaagtgaattccaacattttttgtcaactctgattcttgtcagagtgtgtttccctacatggtaaacaaatgttaggtgtgaggacctggtcattctttctcaggatggggtgccatcacctggacagttcttctccagcagcaaaattaaaactctaggctgggtgtgacccgtagccctgcgtgtgcccatcagaaagactgaatgcctcctcagactcttaggacaaagcactcgaaagtctccaccgtagctgtcatcgtgtttacactttacaacatgtctgcctagttgtttttggagcacagttccacctccttcccaccattctgtttttgctcatgtatgcccgtgtgttttatttcttagtgctaaactgaaatatcctgatgcgcagactgccaacgatgtggccatcccagacgatttctcagacttctcccttgccaagacgattagcaggattgaagggcagctggacgaggacggcttgcccgagtgtgcagaggacgacagcttctgtggtgtgagtaaggacattggcacaggtaggttttcttttcttcatagcttttcccttaacgttacagctacttagttagaaaaaagatttggggggactatttctttaaaaatgtatcacgatttatggatttgtgtctagataataataacgtagagtcatgtaaaggatggaggaaggatggagagtctagatgaagcaagttggccatcagtgttgttgaccaagggtggcgcgagtgcactgaacttccctctgctttcatctcgggcgggtattttgtattgtaaaaaggcatgactatagtattgtttggagttttttgaagttttcaagtgaaattaaaatgtcgtatagcttatcagtggaatgaagtttctctgaattccttttatttttattatgttgttgattatatgttaaattgatatatatttgaaaaggataatttaattgattagcaacacataagtaatcaaatgagttttttaatgaatataattttctttctgattaatttagactctgcatgtaactagcaaaagactgaggtgtgtgaggtgtttttttttatatataagactgagtttttaattatctaaaagtattgtattcgttagcagcagtgcctctaaaattactgaaattgtgaggatccacctgtgctgttgggacaaaaaccagaacaattggaatgagtaagcatagttactgtgaactgtcatttggctgtgaaatgaatacgggtgtgcactatggttagctgcgactccaatctggctcccgagcccctctgtgatagcagtgtctccatttgaaaattagagtttgtcaaatgatgtcttgaacctagctaatatatcacaaaaggctgacagtatctgaggcaggtggtctttcagagcagcgttgtttgagctcaatacaaaccagcagtcacgtctcagctgtgcttagctgttcagccagggtgccggacagtcagtggtcaccaaggtcagtggcagattcccttattgctaggatacatggcttgtatgcattacactacattggagaccagcctctgcagagctgtctgaggcctggctttttatggttcttttgaagcttgcacactttttggcccatgctcctcattgatgtgggcttcctgtgcagtcccagggcattgcttgttccacccaggtgcttgcttctcctgtcagtgtgttttgattgttgggggtttagcaggagtgcctcccatcttattttcttgtttttagttttaaatgtttactacagatgatcatgaagtttatctctgaacttctgacactgaagagtcctaacaggttgtgtgtgtaatgatgattaagctaatgctctagttggtcacagtgggaagcaattcagttatgcgtttgtagcatcacctgacctagtcaagtccctggaactggtagaaggaaggacagtaatgaatcaggaagttggttgttactcttcagatgccttccagggtgtgctggccacatgtttgttcctggagacagtcacccactgccctgttacaggacagagatgtagaaatccaggaccagcaacaggctttaccatgaacatgaacatgaacctgaacatgaacatgaacctgaaccgagacagtaacactgtctcggtgcctgcttcttcagtgtgtttggccagggagagtatcctgtactccaagagcttgcttggcatgtctgggttatggttgaactaatgatctggagtcagtttgggggtacagactgtaagctattgaaacttcatttttgctagagaaaatgtttgtttctatcaaattcttggacattgccaacctgagactgatatcaattctggttgatattttttggatcactgtagtagatgtgagaccggtttgtaaatgcgcaagaacgccagtttgtagtgtggttcttaggagaaggggtttctgtctggtccctctgcccttacccactctccatggctgatgtggccacctgttgctgttctttttagtctcctacctgtggagtgtttaatgttcacagtgttcctgtcatggtctcctgttagactgtctactttggccatattttacttataaaatatgatcttttgataatttataccttagatttgatttttttttaaagcagttatgtaatgatttgacttcacagaggctcagatccgatttctaaaggccaagctccatgtgatgcaagaggagctggacagcgttgtgtgtgagtgcagtaagaaggtaagcttgcgtggcctctcacagcagtgcgcggatcgccttatttggattacaagctatagttaaatatcagatttgaaaattatatatgtgtatatatatatgtatatatatacacacatatatatatatcaaactattctgaaattctgaattaccacaaagcttataaaaatattttttgaatatctcaaaattgttaaaattagaaatccttattttcgacttgctagataagcttattcaatataaataattcaatataaatgacttccatttctgatagtgagtatgaaatgggctttatttttctcagcaaatcatgaaaatatctcatccaagaccatctgaggctcttgttttctgctgtgtgttttgatagcagatcttgtacatttttcacataattgataatgtcattgattgtaggaggataaaattcaggacttaaagtccaaggtgaaaaatttggaagaagactgtgtgcgacaacagcgaacagttacatcccagcaatcccaaatagaaaaatataagaatctttttgaagaagcaaataaaaaatgtgatgaattacagcagcagctgtcatcagtagaacgggtaaacattttgcctcgccttctgacccagtctccaggacacattgaaactattagccgttcttgttagccgttcatttactaagacttactgaaaactcccccttaaacagaatatttgacaactttttgaggtacacatactgtatttcaccttgtagtaaagtacgcagttcagtccgtggctttagtaggttcatgagttcatgtagctatgacctcacatagaacatactcacattttccaaaagatgtctcttaccctccagtcctccccccacatctcccgccctgggttcctgctgtgtttattgtctcagtggccctgtctgttccttccacacagtcgctggggttgatttctcttactgaacacaatggcttttttttttaactgttcaaccatattacaacactaattgtttcattcttctttaattgtggagtatactctattttgtataacacattttgtaatttattgtttgtttatgtatttgtttatctggcaatactgaggttgaaggcagtgccttcctctcgcagggacagttgccagctgctctctaatgactcacttcacttccgccagcagcagagggtccaggctctccacaccctcacctgcccgtcttcagttatcctttgactatagcatcccactggcatgagtatacacacacacttgtatgcatacagtaaaaatctttaatagaaatcatctttattggctgggtgtgatgacctatgtctttaatcccagcacttgggattcagaggcaggtgttggtcttgtcatgtgctgtgtgctcctctgtggtctgtctgtacagtgacaggaccaggctctaaggctcttcatgatccctttgcatccccttgttagatgcttgggtattgtgtctaaacttttgtaattcaactttgctgcttctttttttttttttaagcatgtgtttccaaaggcagaagttttaaatttttggtaaattgtatatatcattatattcaagttttcattctgcccagaaactttttttttttttccattttttattaggtatttaactcatttacatttccaatgctataccaaaagtcccccatatccacccacccccactcccctgcccacccactccccctttttggccctggtgttcccctgtactggggcatataaagtttgcaagtccaatgggcctctctttccagtgatggccgactaggccatcttttgatatatatgcagctagagtcaagagtgcccagaaacttttgcctactccaaagccatgagaatttttctttgaagtattttacatagtctgtataaatcagcatcatatgagtcatatacatgtgatctatttcaagtggagtttatgtgtagtatgaaataaatgtccatttttttcatgaaggtaataacattgttggaaatactgatttatccccatttcattaccatgtcattgactgtcaggcccagttcaagtaaaacttttaaaacaggtgtaaaattgaaaccttgagatttctttcccataacatttgtctgacaacatgtgaattggttttatctgttttcaggaagcagtgtgtcttctctgcatgctataagattaccaggacagacatagtgttggagcacttggatgacagagacagacagatctctgggagtttgaggccagtctgctctaaatagtgagactgattccacccccaaaagagagttatcagtgtatgattgaaaacacttgttatcaaagtttttacccaggttttctcttagtgagcttactcacatggagacatgtcatttgttcctttgctggtcttcctccttgctgtccttttcggatttctgagacgggagttacaaagtcaccagcaaactgaagggcaaaggtttatggcgttctcggtgagactgctggggggcagctctgcagcaggagccgggagagagcgatggttcccagcatagctgcctcccacaaagctgtgcggaagggctgcgcagcagatggcagccaggcgcagcttggtttgtttagagacctacataaggagcagcatgtgttttgttttgtttttccctttaattactcaaagccacagagatgagtttcaaagatgatgtgatatagccaaggaagaaatgtttaaaaagacaagtgtctaaagtgagctctgtctctacagtgattcctgggtgtactgagtgctcttggaggctctgggccagcccggccatgtattgtgtgggatgcgatagaggtgtcaatattacaagacaagcctgagtcttttttttttttttttttttttagatttatttatctattatatgtaagtacattgtagctgtcctcagacactccagaagagggagtcagatctcgttacgagatggttgtgagccaccatgtggttgctgggatttgaactcctgaccttcggaagagcagtcgggtgctcttacccactgagccatctcaccagcccacctgagtcatttttaatatttaattatttatatgcatgtgtatgcctgcatgcctgtccaccaagggcatatggttgtctatggccagaatagggaatcggattcctggaactagagttacaggctgttgcaagttgcctaatatgagtgttggcagcaaatgttcttaatcaccgagcaatctttaaagcctttatgaagatactggtagtgccttttacatgcaactatgatgctgggactacagaaatgaaaaccgttgatagctttaaaagtttgcactgcagagggagaagcaagcaaggaaatggttttagcgcctgcagcagatgctgtgctaaaccattatcaggatggtctagaagccctcaagaaaaggtatcaaatcacattaggtaacaggggatgtacgggaggagaaaagtccatgtccacagggagagatgcaaacagtgccgtggaagcccctaatggaacatgcgtggtgggggagggagttgttaacaccgagtttatgaggtgaggtattttcttcaaacattaaccgtccacttgcagcagctcaatagcttagaataattgcacaaataccccatactttacaaggtaatgctgtttctgctcaggttggagaatcccagtggggctaatgtacagtcctccctttatctattgtttcttcaggcagtagacttggtcagttctccaagagcactgtctatgggcaaatgatctcttacattggtcttttggagggtttgcagaaggccttgagtgagctagatgtggaggcgcatgcctagaatctcagcgctcaggaggcagacacaaaaggcttgagagttttagcccctcctgggctacactgcaagatcctgactccagaaaaattaagttttaaaagttgtgctcctaaaatagatatggaggataattatatagtgttttgaatcagtagaaggaggcagaaaatactaaacaaaaagagcaatattcactggagctagagagattgctcagtggctaagaacaccagctgctgttccagaggacccaggttcaattcccagcactcacatagcggctcacaaccgtctgtaactccagctccaggagatccgatgccttcttctgggctctgcaggcaccagtcatacaagaggtgcagagacagccatgcacgcagataaagcacccaccccccacaaaaacaaaagggtagaaattttaaaaattataaaggcagtcacaagtacatttttaggtgtctttttcgaatacccattttgggtgagaaacccctgagaactgtgtctcttgatgcttagcctgcagccctgtgtgaatgaaagcaagaaacacagaaatgaaataatgtcagacataaaagggaactgacgatatttcaatactccctattttttaactgcacaggaattagaaagtaaaagaagattacaaaaacaggctgcctcaagtcagagtgccacagaggtccgtctgaatcgagctcttgaagaagcagaaaagtataaagtggagctgagtaaactcaggcaaactaacaaggtatgcaaaaccacacagctccaggagtgctcactcttgggagggctcacccttgggagtgctcaccccccagagtgctcactcttgggagtgctcactcttgggagtgctcacccttgggagtgctcactcttgggagtgctcactcttgggagtgctcacccccagatcgctcacccccagagtgctcacctcaggagtgctcaccctctggaagcagtggaaaccattgtttgtttactcgttgcagggagggggtgagtggggtgagagatgtgtggggtgggctggggcacacataccatggtactcctggggaggtcaaaggacagcttcatggagttggttctctccttctacattttctatgcagttgagggatcaaacttaggtggccaagcttacacgttaagcctttactcacagagccatttcaccagcccagaaaacaggacttttgaaattaaaattcttcatgtcatgatgaatgttcattttaatagtaggacatttccactagtcagaactttatggtttggctgttgttgtaattgggtgactgcacaactttggagggtttattcagatctttagagtggcccatgttctatgccagattctttctgaacttgtggataaacaatgggaaaagaaagaatttttcatatatcacctgctaccttcttctctgaacctcaggtttctgccattcgtagggaggggctgtattatggggccacagttctgagcattgagcacatagaggctttttgtgaaattcagacctttaggccttggccttggagcatctcctcaggttagggtgaggcaggaaaatggcactctcatttttggtggtaactgttacagatgtgtcagcagagtcctcagtcagtgccttgatgtctgctgccctagaggaggtggacactgacgtgagggccttttgttggttctataaagtgagttctgcatcatcctgatgggattgcttccttaggacaatcagtaccttaacaatgacttagagagaagagcctcaaactgaaggagggaactcaagtgagcagtcgtcatgatggaagaaactgagatgaagacaactcattatctgtacttaaaggatagaagaacctttaagttgacctctgagcagttgcagaagctaaaaaagcacttggagacagaccattaccctaagaaggaaactctgcaggccttggctgaggagctcatactgtggaaagaagtcatcagatcctggttcttcactcagcatcaaagagagatgaggcacagatggtttttaatgggctacaagggttggataacgcactgtcactactgtacaacaagaaggactgccaggcagaagaactccaaggagtgtcctcagaatggcgttggactccccgaagcgttggaagccttaaagaggctcaagctctcttctggttaccaaagcagagatggcatgtcacaggatttctgacttttcaacttctttgttggggcaggtgtctgtctatggaagaaggtacattaataataaagcttgcgccgggcgtggtggcgcatgcttttaatcccagcactcggaaagcagaggcaggcagatttctgagttcgagaccagcctggtctacaaagtgagttccaggacagccagggctaaacagagaaaccctgtctcgaaaaaccaaaaaaaaaaaaaaaaaaaaaagcttgcattcatagaaaaaaacaaaacaaaacaaacaatgacttagaaaccgcctcgtttcatagctgatggtgcattctgaattttctcagtaacactggctagaaacagagaccttggctagtcttctgacacaagtaccaggagccagcatacggcaccttaactagagaatttcagtgagtccatctgaggcccctcatgctgcgggaccgcttgttccacgttcaaaggtcatcagagatgatctaacagagataagtcatcctcgagtaccaacactcagcacgctgttcagataagaaagtcaaggagagtaacttgctgatttagttgttggtttgattccccccccccccctcgccccccatgttaggaaaatagaaagggaaactggcttcttggcaacaggtaactttccttgtatctagcaatcttgaaaattcaagtaataaaaccttggtatatgaaaaagtggatatgtgcaaggttgacacaacttatttcaaatttcaaaagcttttagtgagacctcatctcaaaaccagagaaaagactttcgactcttttacctacttgcatatttttaggatttgtcactggggatgtttaggctccacagtggctttgttttttcttagcatctaatctgtgtgtatgtattctctggtgagacctttatatcttcttctttttagacatgtgattaggtaaattaaaactttcaggtccttatgtttaaaacatgacaagaaaatagtaaggtttccttaaaatggaacaagattctctcacagtcatcagaaagttaaagatttgtttttaaaataatgacaaagttattttccacagatgctaggaaacagaaaattgggttttaaggtaaaggtaaccttttgaactgaagtcagtcagcctaaaccagatgaagggctacagggatctttattattattattattattattattatttattttagtgtaaggctgtggtgtgtgtgtgttatatgtacaaatgtatatacacacatgtgtattgaaggccagaggttgactctggggccagggttgacactccatcttcttcaatcactctgccttatttgttgagacagggtcttgtactgaaccaagaactgccccgttcctttaatcaacccgaatagactgctccaggattgcacgcataggcaatgatttacatgggtgccaggggtccagactatggtcctcgtacttatccagtgactcaatccaagccctctctggatgcttctcttttcccttctcttctctttttcttcttcttctttttctctttttcttttttgagacagggtatctctgtgtaacaagccctggctgtcctgtactccttttttgtagaccaggctggcctcaaactcacagagatccgcctgcctctgccttccaagtgctggaattaaaggggtgtgctaccatgcccagcctctctgtaatcttaactgttccttcatggcttgtttatgattgtgtcctccaagtctggatagttgtcactgtggaaccttctgagggaaggagttgtcaaatattagaagcaggatatttgatgaaacggttgtttgaaatttggaagcaaagtccttgttacttcatttagaaagtgataatttctgattccttaacaattcacttagaaatatttcagaggtccttttaggtactataccacccagaggtctattggaggttgtagatagatagagtcaagaatcaaatgtagtccttgcatgaatatacccaagttgatggagtgcagaaattggatacttaggttagcagccaggcaaaactagtcatgcacttgaattagtccatgaggcagaagctgtggagggagcatggtgttctgagcaggtagccagaccatggcatttgcttcctaaatgtaatctaaggttatactggaatcatcagtagcagttaggcgccaagagaaaagattatgaacagaagaaatagtgtgtagaaatggctgtgtggcaagaaagaagaggaaggcaatcatagatgtgaaggaggccgtaggagacaagccatgaacattagagaggacagaagtcgttcacatgactcactgggccacggctgaggcttctggaactcattcgcagagcagggcagattaactgtagttgctctgtagagagggaatggttgcagagggcacaaatgaatgcaggtgggctggttaactagaatacaggcaaagtgagagatagtgtaggctgggctgattgtagcaaaaatggaaatgatttgagtatcaaaaattgcatgtaagagagaaaatcacaggatatgggctttgtaagggagaagcctgaggtatttttttaaaggatttatttatttttaagattttatttatttattatatatatgtaaatacactgcagctgacttcagacaccacagaagaaggcatcagatctcattacagatggttgtgagccagcatgtggttgctgggatttgaactcaggaccttcagaagagcagtcagtgctcttaaccgctgagccatctctccagccccaaaagatttatttttaattaagtgcatgtgtgtaagtctgtgggtgggggttttatgcacatgagttcaggtggctgaggagaccagatgagactgttggatccctggagctggagttgactacaggctgtcttgagtttcccgatggaggtgctgggaactgaagtcgggtcttttgcaagagcagtgcagtcttagccacttatccacttactagctcaggattgtttgtttgtttgtttaacacggtgctgccattactaaaataaggaagtcttgaatagttttagagaaggacagttgtggtacatgccagtaggcaaatagtgaagatgagcaggaggattgcaaatttgagaactgaggaacaaactttatgaataattttgacattgtattgttagagctatgctgaggaatctgagatgggcggtcacgacttacgagtctgcaggagcagcagctaagtgggaggcacaggggtggcataaagtggccactgcggttgagcatcgctgaggtgcggttctgtgagaactgttcttgtgcgccgcgtcaacagctgagggtcaccttagacatgcttgtggatggtgcttagtgaggaggctgaggtctgtaagggactaaaagtgagcgaaatgaggaaacgagtgaatgcatgtgagtgagaaagtggatctagagagaaacacaaagttgactttatttgtttaatgatgtaattgaaacatggtgtaatgtagattgtatatgtatagtttggatcttggctcttacattttcattgcccagaaagatcctgtgccttgtccaggtcctttttagaggtctcactgtgctgactgcccttcctgacctaaacacaagtctcactgctgggctcgggactggaagcttgcactcagcaaagagtggggactgacccgcgctgggaaggcttttcttccacccatcttattgatgagctatcagttactcttgtcaaagaacgagcttttgtttttacttgagtctgttttctgtgtccctgacaactccctttcacttctgctttcttgtttgggtttgaatttgctcttttgtctctagctgaagttgcaccttagagcattgattttaaattttgttttctaaagcatttaaagctacatttgcttttaaaatgatactctacatctgtctaacaatttctggcctgttttaagtatatatttcatactttcaagatataactagtgtagcataagcctgcacatgcttggagtgaaatgtgattgagtttgacagttagagcttgggactgagacaggagccgccatgttcaggcagcacacagtgatgctccactaggacattgccattaaactggtttcacacagatcatagtttactcagttcccttcctactgtgccctgtttctcctcatttactgtccccttcctcccttcaagcagcttccagtttgcttgaatatcatacaaatgcacatgcaaacctagagtctccatgagagaaagcagcaataacggtcttgagtctggtctgtttcacttgttctgacgacctgcagttgcgtgcgtcttcctgcagatggcatgctctcatccgtctatactgtcccccattgcctttacccacgcaactgccaacttagattccttcagatagatatccagtgtggtacatgtgggtcacatggtaaatatatgtttgtctcttcagaaaccttcatattgccttcccagtttccattcccaccagctagtgaataagccactcttccccgagtcctcaccagcactggtcttgatggtgtcagttctgactgggtgagatgggatccctgtgtagttttcataataatgcgatttgagattttcagactgtaagttttttgcattatttatagattctagatatttctgccctttcaggtatcagatggctagatctgtaagaaaaattacttattttatgtatgcttgagtatatgtaaataccatgtgtgtacaggtgtccacggaggtcaggaaagggtgtcagatatcctgcacctagactgcaggtggttgtgagcccacatatgaattctgcgtactgaacccagatcctgtgcaagagatctcaacctttgagccatctctccagctccattttctgtagttatttaaagtatataagcgatacccaatctgcctttttttccttcattctctatgttgggttcaatttcttttttctttttgagacagggtttctctgtgtagccctgctgtccaggaactcactctgtagaccaggctggcctcgaactcagaaatctgcctgcctctgcctcccaagtgctgggactaaagacgtgtgccaccattgcctggccaacttcttttttcaatttttttcttttgttaatttttccacatggacatggaaactgcactgaagcttttccttctgtctactggaagaacttacctggaaactttattgcgtgtattctgttggctacttcccacaaattggattattttaaaatttttcattatgctatttaaaacactgattttccttctgttttctccttgaacacaaacattacttagaagtttgccactcagaacccaaggagctaaagggatctgcaaccctataggtggaacaacattatgaactaaccagtaccccggagctcttgactctagctgcatatgtatcaaaagatggcctaatcggccatcactggaaagagaggcccattggacacgtaaactttgtatgccccagtacaggggaacgacagggccaaaaagggggagtgggtgtgtaggggagtgggggtgggtaggtatgggggacttttgggtatagcattggaaatgtaaatgagctaaatacctaataaaaaatgggaaaaaaaaagaaaaaaatgaaagacgaatatctgaaagtcaaaaaaaaaaaaaaaaaaaagaagtttgccactctgtttccacatctgaggggatctccctccccctccagatacctttctcggagatttcaggttaatctcatcatggatagagcacatggtctttatagatttgtgcaggcttgttttatgatccataatatggcttaagttggtaaatgttagtttcatgtgctttctgcctttgctggatggagtagtcctccgatgtcagccacgtaaagttgcgtgacagttgctgtgtgtggcaccatcacaactttctgtgtatttacatccgtgagtaaaggaggaatataaaggaaactgtggctatgttagcttcctcttcagccttatctgcatctacatcctgtttgtcagggctgccactagagagaacattggtgtcttcttggtgaattggccactttgaaaataactgttttcttcccagatgtagcctgtgctctgtgaagccttgatgttccagcagcttgaactctgctcagctgatgtcacctctgccatgtctcctgtcctttccctgttcactgctctatgacttgtagattacagagctgaggttggcttttatgactcagctctcttaatattatttcttatatggacggcctgtctgttaccacagaattccttcctggctcatttgcacttttttttgtgcatgtcagtatttgttacgaatctttaacttaccattatctgtattcagataacacagaatttcacagataacctacaaaactttcagcagctatcataccctcctcattattgcattattttttattatggttaactatacatagaatttacactctttttacacatttttaagtgtaaaatctttattatggttttgcagtctgcctttgtgcttctcattatggaaaagtgggaacgcagtagccccaggctcccaggcccctgcagccactattcagtttctgatcctgtgaatctgacgtctgtacgtgcctcattgctgagtaaaatcacatagttttctttttgattagctttgtttgtttgtttgtttgttttgtttaaaacagtgttctcggggttgttccatcttttcaactttaacttctttggaaggctcaataaaactcggacctgctctttgtttttcttctctcggtgggcacttgggttgtgtgctcttgggtgctatctggagtgcctagacctgatcagaggtgaggatcatttggtttcagtagcatctgtgccatttcacatttccacttgtagaaatggccaagtgtccccatatcatcaacatgagtcattttgatttttattgataccagtcatcctagtgggttttgattgcttcattgaggttttaattcccacatccttaattataagtaatgtgttcagcatcttgtatttagtaactatttgttcatctttaaagaagcatctggtcaagtcctttgttaatttttacattttattgtatattcaggacattaagcctgtgcctatgtggcttgtaaatattttctcacagtcagcagactgcctgccttttcactgtttattgtgtcccctgtggcctttgtgggataaagtccaatttattttcttttggtgtcatctaaatccagtgtcattaagagttttataccttcagcctttttaatcaaagtgtttattccattcagcgtgcgcgcgcacacacacacacacacacatgcacacgcatgtatctggagtatatactatttttgcagaggactcaagttcagtttccagcagcttctagccagctataactcaagttccagggggactgacaccttcttctgaccttttggcacccagcatgtctgcagtgcacagactccatggagacaaaacattcaaacataggaacaacactaaaaacatagaaaaataaacacaagaagacaagagaaaattaaatataggtaaatggcatggacctctcataaaccctcacatatacaggtgtcaagcaatcaggaaaagatagtctcttgaaaaatggtacgaggaaaccccgcagcctgtgtgtgtgtgcgcatgcgcgtgtgtgtgcgcatgcgcgtgtgtgtgcgccagtgtttattgccaatgatacacttccaattattctaatatataaatatttgatttgttttgagctgcccaatattagtctgtgaaaggaacccttttgtctgttgcttttgtagcctacaggtttgctgaatccatttcttggtcatcatgattttcttagaaatccttagggatttccacacctgcagtcttgtcctctatgaggagttgtcttcctctccattgtggatgtcatttgttctgtcccagttgcttgggtgatgtcttctagtgctacattcagcagaagtgatagaagctgctgcctttgcctcaatgctgaccaacactgaagctttcagtcctcaccacctgtgtgtgtgagctgagggctttttgtcatacagtcctttttattgctgtgaaaccagctgaaatggccactctgtgattcctggtttcatgtacttcagtcctccttttttttttttttttttttttgccactgcacctaaaggtttgttgatagtccacagagcaaactttgtttctttgatctattaattcacttatatatgctctcaaatttaccatttacattcctgctagcttcaggggtctccttgctcttaggaaaggttgggctggtttgagctcatctgatcttcgttgtgtcaccgtgtgagcatcccgcccgtgagtgtcctattctctcctgtaggtgctggtgcttgagtaattttgtaaaattttttgaaaattggtagtttgaggttttggtccttggtgtccccaacaagcttacattgaaggcttgcttgatccctgtgtctgcattactgggcagtggtaaaacttttagaagatgggccctggtggaaagacattaggccattgaggggtgtggccttgaaggaaatattgggaactgagcccttttcttccctttgcttcctggcttctttaaagcccagtgtcctctgctgtgtgctttcacgatgacagactgctcctcaggcctaaggcactgggcccagggaacgtgggcagaaactgctgaggctgagcaaagcaagcctccggcaggttgtctcgggcattttactataggccagaaagctgcctcagtgtgtgcttagtttacacatatttaatttctagcttcaatttatggttacagaagacactgcatggttccagtctccctaaacttgttaaaaattatgatctaccatgatttactatggaaaatgacctggttgcatttgagaaaactatattcccttattgttgggaggaatatctttcttagttccaacttatctgcagtcccccgtttccttattgatctgtctggtgaccatgcatgattgaaagtaagataccgaactttctgcatttattgtagtgatctccctttgaatcttttcatttttgcttcttaggtttagtcatgctgatgtttgatacacatgtaattatcacagattggagaacagacccttttgccattatgtaatcatcttgcctcttcctaagtctgactgaggaacaactgtacagtcatgcaatggaaagaggctgatttcttttggctactatttctgtggattatcttcttccatccctcacatgtctttagagataaacctgaacacaagatgcctggtttcctcttttaagaagtgtgtgtggaatcttagctccttctgctgtcttactccttttgtgaaaccttctcttcagtacggcaaacacagaaccttcctggacctagtaacttctactgttccatcttttctgagagttcagatttggtgtccttgttattgctgcggatgagttctctgaccagctctgtagaataagtctttcacaggcttctgagactctcactccagacataatacttctgtctgccagtgctttaaagaaagtgtgtgggtaaaatgtggggctcgttcttggatctccaactcgatgcagtatctcacagtcctgttctctgtctcgagcccagcaggaccactgtaaacctgtacagtggaaagtcttgctaggaatgatagtggaatatgtggctcttacctcaaacgaccataccatgtgcaaattctgctactgaaaagtcttatgttctgtcaagtttaggtttatagatttttttagaattgaaagttaattttaaaaatatttttaaagagctgactgaaattatttagtaatataaagaacaatgttatatttcaactaaaattttttttatttgctttcataggatattacaaatgaagaccatcaaaaaattgaagtgttgaaatcagaaaacaaaaaactagaaagacaaaaaggagaattaatgatagggttcaagaagcagttgaaattgattgacattttgaaaaggcagaaggtgagtctaacaatagacgctgtatctcagatacactacagacagaccgttctgccaaaaagtttgtttttactttgcttataatcttacacataaaattgtatctaaagatgcactgtatacgtgtgaagtcacatctgtgtaatacacagtgaggttcactggtttaaaacacacgcacgcacgcacgcacgcgcacacatacacagatatgtttgtatatatattccctcccaactacagaaagtaccattcatgagaatgactaattttagtggattaatttcctcttcaaactttgagcagtaattctaaaacacattgtatctttcttgaaacatgaaaaaagacaattcacagccctctctcgttacaaagatcaggtataatgatatcaaattattcttttaacagtagcttggtcttcatgtaatatcaatttaaagtgttacacttgcatggttagtatgtataatccaacaatagcttatttttttgatagcatattaacacaaacaaattttcttttgttgtgtgtccatctctaaattgaacaatatatattttttaaaaacagatgcatattgaagctgccaagatgctgtctttcagcgaggaggagtttatgaaggctcttgagtggggcagttcatgagtgagcaactgcaatgggatgctcatttgatatcaagtgtagtcttcttgctgttcatgagtaataagaacatttgtgaaataaaagagttagataatgacctggtgaaataaacagaatgtttgggaggatgttggaagacaaagccagacggcaactctggcctgacttcctttttcattagtagttatgaaataaggaagcaagacttcgactcttaattatcttttatgacctactagacctgggagaggacagagaagatggcagggcaagattctggagatccccagctgcagctgctgagtctgctgcaggcctgtgtgctgtgcacggctgctgcatccaacagcagtgatgcaggctgggaccagaggctgttgtgcaggggctatgtgtgtgttctcttgttcagtggttgtgcacacaggagacaaaatagagatggaaacagggacacacttactgtaccaaaggatcataagtataagtgattatgaacaatttggataacacagaatgtttaatttctggagatatactaccaagaattaactaagatagaaaaacctggacacacccatagtaagaagggagatcaagtagatcaaatccataataaaaagctctattgggagctggtgtgatggcacagtggttacggagggcattgctgctattgcagaggacccaaattcagttcccagcacccacagggctgctcacagccacctttaactccagctctaggggttcaaggcccttttctggcctccattgacctctgcacaaacgggatacatagacatgcactcagggatacacataaaataaaaataaatatttaaaaaaataaatctcctcaaagaaaaacacaggacctgacggcttcactgccagcttctaccaaacatttaaagattggcagttcttctcaaactattccaaaacagtgacataaagacatttccacattcaagtatgctcatcctgataccgaaatcatgcaagagcaacaaacaaaaccaagccaacaactcccatagtccagtatctctgatcaactcagatgcagaaatgctccccagaacaccagcaaacaacttctatacatcaaaagatccctcatcacgatgcagtgggattcaacctagatgatttgacattcaaatcagtaagcatgtcacactgacagaatgaagaaaaggtttgtaaattcagtagagagaaaagcccaagactgagcaacacttcatgacaaaactgtcagcaaagtaggttacagaaggaatgtgctgtaacgtgagtcatatgtgacaaacccacagccaacacactgaacagggaaaagctgaagcttagccccacgtatttgtgtatccaatccttttatattgtgacatgatattgtgatcttcagagttcatactgaaagactatgcaacagaattacaaattaaaaaaatgaattttgtataacattttaagtttgctatttgtagtggtctgcattaatcacatcccaggttgcccatccctataagacctgaaatcagacagttaagagcaatggctaggcagagagcacacgcctttaatcccagcactcaggaggtagaagcaggaagatttctgtgagttcgaggttagcctggacagccaggcccacacagtgaaactctgtttccaccctctccaaaacctccccaaaagagcactagttgctcttgcagagaacccaggtttggttcccaccgtgcgtatggtcccagtcatctgtaactccagttccagaggctaggacaccgtcttgaggcattcttgagctctgcagacatctagtacacatatatgcaggcaagcacatgtaaaatttttttttttttttggtttttcgagacagggtttctctgtgtagccctggctgtcctggaactcgctctgtagaccaggctggcctcgaactcagaaatccgcctgcctctgcctcctgagtgcgccaccacgcccggctcgtaaaatatttttttaatcttagcagaaatgctaatcaaatataaccagcaagagaaagaaaaatatgaagtctgggaacaaagaagttgggttgtccattatgaaaaatggttgagatcaaatcaactgagtaaagttacaaggtaagaaaaccaataggcacacatcaggagactgacagcacaaatgaaagccttgagctgtagctcagtggcagagcacttacagaacatgtatgagaccccagatccagtccctagcatagcacaagccaaagtagtggcatttttatacatcagtggcagaatatcagagaaaatctacagtaccccatttgtagtatctaacaaaaacattttagactaaattttaccaaggagattgaagatggctgtattgaaaactacaaaatattgatgacagaaacttgagagaagtaaatagctgtttaatgtttatgaattagaaaagtgtcttacatactgcccagagaggtctgtcgtctccctgtagtgagctgctgtgtttggcctctggttctgtggaattctgtgatatgatggcatcatagaatgcatagtaaataaaaatgactaattctgcagttaaagtactaatgtgtttaatttttgtcaaactgtatacatgatgaaataggaggatgttttagaacatgcagatagaccagggcctactgtcaccaactgtaaaacagcagttacgctgacatctagtggcagcatctgagcactccaggtctcgcccggtcttgctatgaagactcggcttcagactccatcccttttctgataggccttcctgaactcttcaccaagcatgtcaacatcgtcttctcttttaaacactccctacaaagaagcattttgttggttactttgaacattagagtatttcactgaattttcttaggactaacacacacagacatgaagctaatgaagaaatgcagataatgagatcgattattgaaacttaattttaaaatatcagaaagactatggcttcaagtatatctgaatatcactgagctgctcccagttcctgattactcaacctcagagtattaagctgtgctaggggctgctgtgccttatgctctaactccggccgtgactgcctacattacaggctactgtccggacgcactctttctgcctcagtctatcagcggctcattctgagacactgaattttactcttaacgggtcccggctgccctccagaagtattttctccactcagatgttgaagtccaaaggccctctcagcatatatatagtctgttttattaaatataccaatcatgggtgaattttggcatcaggctatcatgcgtatttaaatctacctaactaattagactttaatacactacggctagcaacttttaataattttcctttttctttcattggttagggactgaacacacttgattctgcatagtcaataaagacttcaagcaatatgactcatatatttgaaggactgtggctttatgaatctccatgtttatatggataaggaagctaattattagcagtcacaatgtgtctcaaatactatacatgaaaattcattgcctattggaatagctctcaatagttgaggctgcctagtacctacttacaatcagtttcccacagagcagactcggctcagactcatgtctagcatgtgttcacccatgacaaggcttcatgtctctcattatcttcatgtttacccttttatagttgctctagggtagtttgtttcagatttcccatgcaacaagcagatgaagagcctcaaaagtgttagctcaggggctggggatataggtcactacatagagcacttgcctagcaaggctctaggttagatccccagccccacagaagcttggcaaagtaacacaagcctgcaggaggagaagcaggaggaccacaagttcaaggtcatcctctgtttcatagggagttccaggccagcctgggctacaccttgtctcaaaaagtaaataaatgaataaataaataaatgaataaatactcaatcttgataactctagctcagatcactagtaatgctccaggacaagctcttgctatcgaggcatttaaaaaggacgataggtatcaactctgcctgggtcccagtgcttcaccaacaaacaacagcatgaagttactccctctgactctagaatcacgcttcagcgccgttgttttctccagtaggacgaggctcacacactaaggtcagtgtcacttactttggggagatagcctagtaactttgcagcatgttctttgaggagtctcagcctctcttcttcaataatctcattgatgcagccctgccgcctttgctgtagttgcaattcctccagctcacgttgctgcaaacaaaatcaaaatgttttaactgtcacacaatacattcatctcttatgaagtttacaaataaagctagatgataagactggtgtgttaattataagattagaagataattatgtatatctttattttttaaagatttatttattatacatatgtgagtacactgctgctctcttcagacacaccagaagaaggcatcagatctcattccagatggttgtgagccatcgtgtggttgctgggaattgaattcagggtcttaggaagagtagtcagtgctcttaactgctgagccatctttccagcccatagtgtatgtcttttaatacaggtaaatatatatacctgtatttttatcatcattatctctctaaactttcaagaacaagttatatcccacccgtatttttgttttctttatttgtggtgctggtgtttgaacccagggccctgcacctgcacctgctaggcaagtactctaccactgagctgcaatcccagccctatgacaggaagtttaaaggacacattttttttttaggaaaatcttcaatctcaagaaaaaatgtattcaaatgagtgatttcctaactaattcagcaaatatttatgcagtttccaccatataccccgttcccaagataccccaaacagtttatagtgtaagacaaaaataaaatcctaatgcataaaacaaaacacagttatctgaagatacgtttttttaaatgcatcgttaaaggtctaagtggagcacactgcagaggtcagagtcccagcaaagaagctatggtacctttctggagaatactgaattctgtgggtactctgagctatggaatgccgatgtgatgtcatgtacataacattagggcccagagaactttacccaagccacactcctgagtaggatctgcagaagtgggaacggaatcaggtaagacctctaccacggaacagcaacccagccccacacactgatttaatgagatgacgtaacctatctaatcttggcataacacagggttttccttcatatgctgtgctaccccacactacatgtttacccccacttcacataattctactctaaggcaggtcgatcggtttagaaaggtgtgggacaaagcctgaataaactggtagtaaagtctttttaggaatttgtttaaaccatacacattcttagaggtgaacaggattatagacagctacttaggcctctaaaatagaaatgggcagtttagtgcttttaaggctacgtaatgctaagaattagtaagttctgttaaggcatccacatttgctcccgggcaaagcaagacttgtcttacacaacactgacatccaagccagttcttcatactgggcatgcttactactaaaccctaaaacatgtgtgatagcgtgtgttactaggggttttagtgaattccatgtttgcatgtcgtgctggcttctctgagtgtcctgatcagctctgtaaccctagagagggtccactggtcctacccttctacaggagttaactcctaggccatacaggtggttccaaaacctttttagttttctatattcattaactcaacatttaaaagtaccaaatgtcaggcaaattgcattttatagagcattataaatcccttaaaggttagattcaggccaagactgacttacaccaggcctaagcaattgtggctttgatctgtttaagagttccctgaggtttaagtgtgaagcaacacgagatttataaaaattactgattggcagcctgaccagttacaaggggaccaagctgaaatgccaaggagcaggagggcctgctggcctctttgttttctgtgatatcatttacggtctggtttttttttttttttcttctcatcttaaaccataatgttctccaagactcaaccctagactcctgatgctttctcattacaacaccaatatatcacttaaatctcttggtgctgcttaattctgggtaagcacttctcaaaaaaaaaaaaaaataataataaagaaaaccaaaccaactaaataaacaaaaatatcaaacaaaccaaaccagcctaagcctcactgtgacatgtaaccacatatgtgctccatgtaaccacacatgtgctccctgtagccacacatgtgctccctgtagccacacatgtgctccatgtaaccacacatgtgctccctgtagccacacatgtgctccatgtaaccacacatgtgctccatgtaaccacacatgtgctccatgtaatcacacatgtgttccatgtaaccacacatgtgctccatgtaatcacacatgtgctccatgtaaccacacatgtgcttcatgtaaccacacatgtgctccatgtagccacacatgtgctccctgagtctctcacacttgaaacctttgaaatattttgattccttccttcttctactctatatgctagggggaaaatcatacagtctcaattatttcctgtaattcatctgacatcccctactgctgctgctgtttatggcctgtaaaagctagaactgccactggacgtctcagaggccactcttattacatttagagttttcacacaagactgtgctgagttcttaaaaatacccttccagtgagacagatcgcttggggattctttcagtttgtcattgacgcataaatatttaagtcagtatgtcaaactcacaagctggttccctgtccaactttttttcccccttattagatggggtttctctgtgtagccctggctgtcctggaattcagtctgtagaccaggctggccttgatctctgagctctgcctgcctctgcctcctgagtgttgggattaaaggtgtgtgccacaccacctggctcctccctatctgacttttaaatcaacatttccaacaatcaaccttctcttctggccacaaaatcaatgtgaacaaatgcatattccttcccaggctgcttgcctctctacgtgctccttaggacatggctggctcccttaagaaaggagtgtcgtcgtgctgcaatcagtgctcacctctccagattcacctgctccccaggatcatcagttctgcacgtgtggcatctaaggagccccttcagcgtgcgcacatgccacctcttatcactgagactccgtacactgcttactgcccccaccagctctggactcgctcctttaacttctattctcaatgatgctacttggatcatccatgccaaacttaacatgcaattccctaaattcttcagtgacttctcttggggaaaaatccatcttaatattcaaaggtatcacgatgtgtaattcttctgctataccaatgtcaccacacccttattatcacacacaaaatacatttataacttagttatatattgttcttgaccaagactatattcacagatgctagttctcaagtccagcacataaaagccccaatagtcagatgctttaataaatgatcactcagtaaacgtatagctcacatgatcagtaaacaaatacctaacgtatgacacataaatagttttcagtgggctgaggcgatggctcagtggctaaagtgtctggcacacaaccatgaggacctgagtttatatcgtcagaactcaggtaaagtcaggtgtgtattccagcttctgacaagtggaagatggcaataaaagaatcccaagaaatcccaagatgtccagcccccaggtcacctgcagtggacgagaccttgccttacacaaattgaaggagaggagcaatgtgaggttgtcctgtgctacacactagggtgcacatgtgcacactcaagctctctctcactcctctcttctctctctctctcagcaaatgtttactgatgaacacatgagctgggtgctgttcaatgagaataaccaaagaaccaaggctttccttactttgtctgcgaggaactggctccggcgttcttcaatgagtttctccacggcgcgtttgtgctccagctgcttcattcgctgtttctgggcattcatgagctcaatgcggtcatcttcggcaaacttggccagcatggctttcttaaaggtctcttcctcctcttttgcagcctgcagtatgagttccttcagtgccatttggtcttcaaagtcttgcttcatctccctctgcctcctcagtctcagctctgcttcttcctgcacgacagtggggctagagttacgtgtgccctgcattgtcatgagagggcaagctcagtgagagggagccaggaggagggtcaggagcttgagaccagcctaggctacagtgagatgatgtctcaggaaacaagacaaaagaataagacagagttagggggctggagagatggctcaggggttaagagcactggctgctcttccagaggtcctgagttcaattcccagcaaccacatggtggctcacaaccatctatagggggatctgatgccctcttcaggcaggcagatgtatatgcagcagagcactcataaattaaataaataaaaattaaaaaaagacagaggttatgctgcagattacaatatgaaatcagagagacagaattaagccttttcacggctacactctgtcccaccctcttaagactatggctcttaagacttttgaataaagtgacatgacctttttaaaattgatttttacttgtgtgtgtgtgtgtgtgtgtgtgtgtgtgtgtgtgcgcgggtgctcatgcgcacatgtgcaagtgtgcacagaggccagaagagggtgctggatgccctggaacaggaattataggttcctgggtcctctccaagagcagcaagtgctcttaattattggatctatagcatggcggtcatttattctaaaattttaagttgtatatggtgccatcttgtttctaggctcagaactgatgtgtgactgatttgaaaggagccactgtgaaagcctttgcccactcctgcgtttactcatcttcaaccgaggacggttacgtcacgtgtccaaggtgtggaccaacttcctcaccttgtgacacccatgcatgctgcatgtacccactctagtttctaaccctctgataattctcaaagcaacaaacaacagaacaaaacaaacaaacaaaacaccccccaaactgcaaaatagtttaaaaaaaatcagtcatctagcaatgaaattggaagtttttcagagaaatagaagcgtactggacacaactaaattcctttcctgtgagcttttattttctaaacacttaaaatttttcatatacaaaaaatgtaaaaacgtttataataaccatcgatactcctaacagctgaagtctaatgatgacagcttgctgttggtgtcctgtcacctatctgttcacccagagctagcacgcactttaactcacattatcttgtaatcccctcccccgcccccaagctctgggaagccactgttcacgcatctaaaatcttaacagccgcaccagcctctcacttcctccatgggcatgtgcctctcgcattccctcctgaaactaatcaagctactcaaagacatatattttgttttatgttctgggtacatgatgttttatactgcatattttgtacttacttgccaaataattgcacagacatcaagggcttggagaacagtttagtttgtgacattt

SEQ ID NO: 824 - DNA, 2054 bp, Mus musculus
ccatgtgaagtattgtggccttgtggtaactcttgatgtctgatagcacagaggactcgcaggtttgtggattaaagcgctagtctcaatgggtgaagggaacccaggagctgctggtcaaagcctatgcaaaagctgttcgaggtggagacagaagaggctgccctttggcgggaggctgcccgagacctgagaactctcgcgggaagatgtacggtcaccacggcaaccgcatcgccccggggttggtaaagatggcggggcgaagtgttagagtgccgagacgcggttctgcaggtacccagtcgcgcgggcagcttgcagctggacgggacctcctcgcccgggaacaagagtacaagcgtttaaatgaagaattggaggcaaaaactgctgatctggttcgacaagctgaggaagtaataagagagcagcaagaagtgcgagccaggcctttctcagcactaactacatcatgcaaagaggaaggtggttccagttcgagagatctgttgtcatctgaagggactcatccatggacagaaaccaagccaaagaccaaaaacactggtcctgtaaacaagattcaaaacagactccactctgcagataaagaaaggaaaacaaattcaagtgctaaactgaaatatcctgatgcgcagactgccaacgatgtggccatcccagacgatttctcagacttctcccttgccaagacgattagcaggattgaagggcagctggacgaggacggcttgcccgagtgtgcagaggacgacagcttctgtggtgtgagtaaggacattggcacagaggctcagatccgatttctaaaggccaagctccatgtgatgcaagaggagctggacagcgttgtgtgtgagtgcagtaagaaggaggataaaattcaggacttaaagtccaaggtgaaaaatttggaagaagactgtgtgcgacaacagcgaacagttacatcccagcaatcccaaatagaaaaatataagaatctttttgaagaagcaaataaaaaatgtgatgaattacagcagcagctgtcatcagtagaacgggaattagaaagtaaaagaagattacaaaaacaggctgcctcaagtcagagtgccacagaggtccgtctgaatcgagctcttgaagaagcagaaaagtataaagtggagctgagtaaactcaggcaaactaacaaggacaatcagtaccttaacaatgacttagagagaagagcctcaaactgaaggagggaactcaagtgagcagtcgtcatgatggaagaaactgagatgaagacaactcattatctgtacttaaaggatagaagaacctttaagttgacctctgagcagttgcagaagctaaaaaagcacttggagacagaccattaccctaagaaggaaactctgcaggccttggctgaggagctcatactgtggaaagaagtcatcagatcctggttcttcactcagcatcaaagagagatgaggcacagatggtttttaatgggctacaagggttggataacgcactgtcactactgtacaacaagaaggactgccaggcagaagaactccaaggagtgtcctcagaatggcgttggactccccgaagcgttggaagccttaaagaggctcaagctctcttctggttaccaaagcagagatggcatgtcacaggatttctgacttttcaacttctttgttggggcaggtgtctgtctatggaagaaggatattacaaatgaagaccatcaaaaaattgaagtgttgaaatcagaaaacaaaaaactagaaagacaaaaaggagaattaatgatagggttcaagaagcagttgaaattgattgacattttgaaaaggcagaagatgcatattgaagctgccaagatgctgtctttcagcgaggaggagtttatgaaggctcttgagtggggcagttcatgagtgagcaactgcaatgggatgctcatttgatatcaagtgtagtcttcttgctgttcatgagtaataagaacatttgtgaaataaaagagttagataatg

SEQ ID NO: 825 - protein, 387 aa, Mus musculus
SQWVKGTQELLVKAYAKAVRGGDRRGCPLAGGCPRPENSRGKMYGHHGNRIAPGLVKMAGRSVRVPRRGSAGTQSRGQLAAGRDLLAREQEYKRLNEELEAKTADLVRQAEEVIREQQEVRARPFSALTTSCKEEGGSSSRDLLSSEGTHPWTETKPKTKNTGPVNKIQNRLHSADKERKTNSSAKLKYPDAQTANDVAIPDDFSDFSLAKTISRIEGQLDEDGLPECAEDDSFCGVSKDIGTEAQIRFLKAKLHVMQEELDSVVCECSKKEDKIQDLKSKVKNLEEDCVRQQRTVTSQQSQIEKYKNLFEEANKKCDELQQQLSSVERELESKRRLQKQAASSQSATEVRLNRALEEAEKYKVELSKLRQTNKDNQYLNNDLERRN

SEQ ID NO: 826 - DNA, 83965 bp, Homo sapiens
  misc_feature (1)...(83965): n = A,T,C or G
attaaaatttgtgggtctacatctggactgtctcttcttttccattgatttacatgtctgcattttttatcagcactaaaccatcttaattactgtagtcttggaatcagttattgttaattcttcaacattgctattcttattctttctcaaaattgttttggctagtcattctattgtctttccatctaattttagaatcagctgataaatttctacaaaagttttgctaggatgttgattggagagaactgacatcttaacaatattgagtccaccaatccatgaacacagtgtatctttctgtttagttatctttgatattttctgatgatgttttgcagctttcagcatacatattttgtacatgttttggtagatttatacctaagcatttgtaaatagtactgcatgttaaaatttgatttccaattgttcatactaattatgaacatactaattatgaataattggaaatcaaattttatagtatataaaactataattttatagaatagaattttatagtatggtatatagaagtataattaatttttgtatattgacctcgcatcctaaaactttgctaaactcgccaactactttcatgaattttttgtagtctggtattttctaagtacatatgatgtcatctatgaacaaaaagttttatttcttcatttctaagattatcaattgattggcctcgttatacaaggtggaaccttcagttcttcagtatgattataaatagtgatgacagtggaaatgcctgtcttgtttctgacattaagaggaaggcatttgattttttaatcattaaataatgttagatgtagggtttttttgagatgccctttattaggttgaagaagttcccttctattcttagttggatgagaatccaatgttttagtcttctttttctgataaactccacaaactagacattattattagtaggacctttagataaattatttatttaggcctgcatgcatgtttatcatcttgtttgctcaccattcttctggtgtttcaaaatactccactagtgttttttttcttcctaaagcatgtactttagaagtgcctttggtaggcatacgtgtgtgccaaatctcttaggttttatttatctaaagatatctttatttcaccctcatcttgcaatacagtattggtgaatgagtgcacagttctaaactgaaattattttctttgatcacttttaagatacagtaaaatcccctcatactaagattagtgaggttgaatatttttaacttcctgaaaagaagagtgggcttattgtgataattaaagaaatgagtcacttgagcctgtctagctgtttgactagaagttccagtggtctggctctataattaaaatatttgctcatcctggttgtggtttggcatcacatggtggtggtggtggctatctgctccaaaataaatgtcaaatggtgccaattctggatcctgtctcactggctaggacttccagaacagtggcagcaattgtagtgatctcgtatttagctgggtcccatttagtcggtctaatcaaaagagatagggctataagaatactgtcaataaaggagtcatcctcaggctcactgtttcctgagatagagtgctgacttttcccaccaatcccttactatgtcccctaccctataaattcagaagatagaagtttgtcctacccagtttgagaatagaactagacagaaggctgccattcattagtgagtaattggtcattaataaccaagcatgcttgatccaaattttcattataatggggcttatcatcatcaaattctgctaattattttattgtatttctggctttcattgtagctattaaaacacctactttaattgcttctttgtaggttatttgtctttttttcctcttggctgctttaaagatctcttttttctttggtgttttggcattatgacagctccaggaatatatttaaaaatttatcctctttgtgatgcaccatgcttcttgaacttacatatttgtatctttcctaaattctggaaaattctaaggaattaacttttgtagtattgcttctcaatttttcaaatctatccttcttgaaatccgatttttttatatgtcagatcttttcagtctaacttcagtactgtttaaccattctctgttcattctgaataattttttcagatatgttatggtttactaattatctgtttataatctgccattcgacctgtccattgagtattttcatttcaacaaatatgtgtttaatatctgcaagcttcatttgattatttatcatatttgcctggtcattcctgatggtctctttttgcttgctcattgttgtgattctgtcccttatttctatttctttctaaatagattttctctatttcacagctgataaaattttaatatctgaatttattggaagtctaaatatttgttatttcttctaattttgcacttatggtgacttgcttcctttatgtctggtgatttttgatggtgaactcacattgtcttaatcttaacctgggaatttagtgggcttaactagaaattttttcttgaaaaagatttgtgtttgaatctgctaggaccgttggggcactaccagtctaaatgacttttagcctttttggtttctagattagcacagaggtctcagattcagctcttccatattgctgttgatgtaagccttgttttctgaatacagttccctggggcattttctcagcttaacctttttattcttaaatgcctactatcagaagatcttgtttatttgtggggaagagatctggagaatgagatgtcaggaggacacatggaaatttctcctactttcttcaagttcagtaatgcatagataagttttttttttttttccagaatctggtcgttgtgcagtggaagggtgtcccagatcatctagctcacaattttgttgaagaagaaaatcccttttaacttaaaaaaaaaaagatttaattttttagaagttttacatttgcagaaaaactgagaatatcgtagagagagttcccatataccctgcacctagttttccctattattacgatcttacattaatatggttaaattgttgaaattagtagaccattactgatacattaactgaagtccatagtttattcagaattccttgtattttactatgtcttttcctattctagggtttggtccagtatgtcactgatatggttaggctttgtgttcccacccaaacctcatcttgaattgtaatctccataatccccacgtgttaagagagagacgtggtgggaggtgattgaatcatgggagtggtgtcccccatgctgttctcgtgatagtgagtgatgtctcatgagatctgatggttttataagtgtctgacatttcctctttcacgtacttgctctctctcctgccgccacgtaagacatgcctgcttctccttccgccatgattgttaagtttcctgaggcctccccagccatgcagaactttgagtccattaaacctctttcctttataaattacccagtctcaggtattttttatagcagtgtgagaacagactaatataatcactttacaaagctgttatatctctttaagctcctcttggctgtgacagtttcacagccttgttttggttgaccttgacaattttgaggagtattggttggatattttataggatacccctttactagaaatttttattgtggtcaaatatacataaaatttaccatgtcaaccatattttaatttggtggcattaaatgtaatatattcataaagttgtgcaatgatttaataatctttatccattttcagaactttttcatcatctcaaacagaaactctgtactcatgaaaaaataactccctattttcctctctccctagtccctggtaaactctgttttctgtctctatgaattaaccatttctaggcaccttaaataagtggaattatgcaatgtttgtccttttgtgtctggcttatttcacttagcaaaatgctttcaagtttcattcatgtagtagcatgtctcagaatttcatttctttttaaggctgaatattattgtattgtccattctatgtatacacaaattttgtttttatcattttattagttacaggagagttttatttcttcttttggattttcttttttaaaaaaattttctttatagacattcatgtcatctatacacaaagatggtttatttcttccttccttatctgtatactccttattcccttttattgtcttattgcactagctagaacttcagatgtaatattaaataataatgatgataaaggacatgtttgtgttgttcctgatcttagggagaaagcatccaatttcattaagctgtagatattttgtggaagttctttatcaacttgaggatatttccctgtagtcctagttttctgagagtttgtaccttcaggggtgttggattttgtcaaatgcttttgctgcatgaatttatatgatcatataatttttcttctttatcctcttgatgtgctgaattcattgattgattttagaatattgaaccatccttgtatactgagaataaatcccactccattgtgttgcataattctttttagacattgttggattatattggctaaaattttgttaagggtttaaaaatctatattcatgagggatatcagcttgtagttttcctataatgtctttaactgctcttagtattagggtaatgctagagtcatggaatgagttgggaagtgttccttctgcctttattttcccaaaaaagattatgtagaattgttatttcttccttaaatgtatgttagaattcaccagagaaaccatctgggactggtgatttctttcttggaaggttattgactcaatgtccttgcctactcagattatctatttctccttgcatgagttttggtagtttgtatctttcaagtaattggtccatttcatctaatttattaaatgttggggtatagagttcatagtattcctttattatccttttaattttcatgggacaattgatgacttattttccatttctaatgttggtactgtattgtttatattttttaattttctgtatattatgatgtttagacatctttaaaaaatcctttctggcttgggagaaactgcttcctcctggggcaagccaattcttagctaagcaaaagggcttagccagggagcatggctttgatatataaaaaactaatatgaagccatacctcttctgtctggtccatatacaacaggccttcctctgtcttagccattgcagagctatgtaccagataattaaggacaacctttatactccggggccctctgaaattattcatagtagccaatcctaatgggtttactctaccttgcttttcctgtggaaactccaatagaggctctagtccaggcttttctcttcctcctgttttctgcctcctgactatcccgaggcttccccatgtaaccctgtatggcatggcatgcgtcctatttctaggacctgtgagtataataaatgttgttttcctctcatggccacacctgactgaccatcacagaaaataacacagaacaggttacttggatcttctctttttcttggttagcacagctataagtttattgattttaactagattgtggtttctgtgattttctctattgtttccctgtttcagttccattgatttatgttctaatgtttattgttacttttcttttgctttaagtttaatatttttcctttagctgccttgaaggtagacattcagagtttagatttttcttcttttctaatatatgcattgaatgctaagcactccaagcactgctttcataacattccacaggttttgataagttatatttcaaattttatttagttcaaaatgtttttttaattcctctagatatttacttgatccatgtattatttagaagtatgaatttaatttgcaaatattttgtgggtgtccagctgttttgttattgatttttagtttagttttattgtgctctgggaccacaataaaatagtttgtataatttcggttataggttaaagtgtgccacctccccctccctaccatatattgaagtcctaacccccagtacctgtgaatatggtctttacagatgtaatcacgttaggatgaggtcattagggtggcccacatccgatattactggagtcttcatgaaaagcaggaatgccatgcaaaagcagaaacacacaggggaaatgctacatgattatagaggcagagagaggttgtagtgatgcagctgcaagccaaggaatgccaagaagtgacagccaccatagaagctagaaagaggcaaagaaagagtctcccctgcaggtttcaagcaaaacatagtcctggtgatacttctagcctggttttggacttctagcctccagacccatgagacaataaatttctgttgttttaagccactcacttggtggtgctttattacagctaccctaaactatataatttatattcttttaaatttattaaagtgtgttatggctagaatgtgttctagcttggtgaatgttccatgcgaccttgagaaaaatgtgtattctgctgttattgaaatgagtattctataaatgtcaattagatcaagctaattgatggtgctgtccagagcaactcttgctgattttctgcctgcttaacctgttaattactgaaggagtagtattgaagtctccaaatataatgatggatttgtctatttctctttgcaagtcctaccagtttttgcctcatgcattttgacactactgttaggaggatttacaccaggattgttctatccccttggagaattgacctctatcattaatgctcctctttgtccctgataattttccttgttctgatgtcatctttgtttgaaattaatatagcgactccagcttccttttgattagtgctagcatagtgttcctttctttatccctcgatgttgtaaatagtttatttttaagatgttttaacagcttgagtgatttatttcacatatctatatttacccatataaagtgtactattaattggcttttagtgtattcacagagttgtacaccatcaacacaattgattttagaatattttcactagcgccccccaaaccctgcaactccttagctaaccctccatcatctgccaagcctagacaactactaatctacttctgtcactatggatttgcctattgcggacatttcctacaatatgtagtcatattgaaatagaatcctatagtatgtgatcttttgtgaaagaaattagataatacttggtcttttgtgaatggcttctttcacttagcataatatattcaaggttcatccatattgtggtatacatgtacttcattctttctcatttctgaataatattccattgtatgaatataccactttttatttaattactaatcagtttatgaccattatgggtttgttttgcattttggctgttatgaataatcctgacataaacatttgtacatatacttttcatgtgggtgtgttttcattttccttgggtgtatacctagcagtggttgctggattgtttggtaactctgtgtataaactattgaggaattgctagaccattttccacagtggctgcacaattttcccattcccactaacagtttatgagggttcaagtttctctacatcctcctctacacgttattgtccatccttttttttttttttgagatggagtctccctctgtcacccaggctggagtgcagtggtgctatctcggctcactgcaacttctatctcccagcatttcaccatgttggccaggctggtctcaaactcttgacctctggtgatctgcccgcctcagcatcccaaagtgctgggattacaggtgtgagccaccgcgcctggctatccatccttttgattatcgccattctagtgggtgtcaagtggcatttcattttggttttaattttcatttccctgaggacaatactgagcatcttttcatgtgctttttgcctacttgtatatgttctttggagaaatccctatttctttgcccatttttaacttgggttgtcttttttaaaaatttttttaaattgtttttctttttttttttgagacagggtctcactctgtgacccaggctagagtgcagtggtgtgaccatggctctttgcagccttgatctccctggctcaagtgatcctcccacctcagtctcctagtagttgggactacaggcatgtaccactggacccagctaatttttatttatctatttcctttttttttttttgtagagatggagtcttgctgtgttgccttggctggtctggaactcctgggctcaagtgatcctcctgacttagcctccaaagtgctcatattacaggcatgagccactgcacctacctatttttgaattttaatacttctttatatagtccagacacaagttatttatcagatatataatttgcaagaatttcccctcttcctgtggtcttgttactttatttatggtatcttttgaaactaaaggtttttagttttgataatgtctagtttatctatttttttttccttttttttgtttttttcttgagatggaatttcgctcttgttgaccaggttggagcgcaatggtgcaatctcagctcaccgcaacctctgcctcccaggttcaagcgattctcctgcttcagcctccccagtagctgggattacaggcatgagccaccacacccggctaattttttttttttaggagtggcggggtttctccatattggtcaggctggtcttgaactcccaacctcaggtgatccacccgccttggcctcccaaagtgcttggattacaggcatgagcctctgtgcccagcctcttttttcttttctttttttttttttttgctactgcttttggtgtcatatctaagaatccatcaaggattctcagaattgtaattcaaggtcataaagatttacaccaacagtttctttgaagagctttagagttttagctcctaagtttaggtctttgatacattttaatttttgtatatggtgtgaagttaagggtctaattgcatttggatatccagttgtctccccatctgttgaagacaattattttcccattgaatggtcttgcaccctttctaaagatcagatgaccatacatcatatcacggtttatttttggatgtcaattttattccaaaacaattgaaattgttaaccgcttacgtgtttcaggcatgatcctaagcacgaattcatttgcttctcataataactgtgaagtgggcactattctcacttccatttgacaaatgaagtggccgatatacagagtgatttgcccaaggccatataactggtaagtggcagtgccaggataataatttaggttgactaacttgagagcctgagtcttagccatgcatgctgtaaacaaaaattagaaatcaaaacttctgaattccactgaagagctcactttaagcaaacggggtgaaggtcggattagccactaacggtttgaaaagcacaacagggagggattgcctcaccagcttgctttctatagagtagcggcaaaggacctgcctgttttggctgaaactctttcaacccccacaagttgagaatttgcactaactaagtcgaatttgcagttaggaagccttcctgggttcctgggacagcgccgagtgctgcgagcaaaggccgagcccgctgccagaggctcgcgccgctcgcagcacagaacctgagagtgggaaggcgtaggcgcccgggcgggaggcaaccgggatgtggaaactctcgcgggaagatgcgtcgttgcctcggtaaccgcgtcgcagtcgccgaagatggcggggcgaagtctgtgtctcacggtcagttcaactccaggctcctggggagcgtctgggttccggcgactaggacgcctaacttcctttaacttcgggtctgaaagtctgtggctcttttacagagaagcagcgttccagggactccgttcccgccacccgttcagcaaccctctacacctggacccgacctcctcgccttggaggaagaatataagtaagaaattcggcggttgaacttttccttctttctttcatctgaatgaggctgcttacaagtacttttttctggagactggctggatcttcgggaccactcactctgcagcattcccttctcgtcatctcgttcacctgccgtttatcctttctttgtctttgatctgagtagttcgcctgcgtattagaagatatttgaagtgggcgaaaatttagcccaagtaagcatgttgtttaatttaaaacgtagcccaagtaaacagcaagatactgttggaagttatttgggtagcaggaattgccacgaatagttagttcacttgatagtttaggttatttcgcttaatatcaagttcatagagtttaccttgtgtaaatttcctttaggttggtttctaaattgaaaggatgcttcccactgcaatcagaattaccattctcgttcaaatattccttttcttatctgttctcagtgtaattacaactatcctgacaacggtgctttcattcttggcccattctactcctcatccccaagttttcacacagcagccagtgtaatcttttaatttgatctaccatgcctttgcttaaaattctacagtagtttcctgttgcatttcaaaagctctgatcgatgtggctcctcctgcctcctctatttgatcttattccctcttccccttttccccctaaaactctccagcttcactggccttttagttccaaaaactcttccaggttttctttctatctcaggaaagagacagtcacacacgccttcaacctgtaatgtgagtggccttccttgaccatgctaagtaggctcccttgttggtctttttcattgtctcagtgatttttctttctaattagcataatttgttacaataaattcatttgtgaatttcctttttgtctgtctccactggactgtaagttccaagggcagaggcgatgtctgttttatttgccatcatacatacccttataaaaaagtgccttttaacaactcccttccgttttaatataaaataactagattaaaatttggaaatagttggcagtttgtatcagagggttaaactagagttatcgtatgatctacatatgatctataagcatatttgaaattaaaactgaaaggtactgtgtttaggtgaactatacacagaccaatttaccacagcaagtaggaagataatcatatcttcttctctctgatgaaatgggccgattatcccagttcaaaagtgtacttaagcaaattaatctgttttctatatatagttctttatcagctatgcctcaatcaaaacggttattttcattatcattaaccatatagtattaaatacctggattaggtttatttgttcagttatttgagagtgtattttgcacctggttctggtgcatccttagggatacagtcctgcttaaaatgagaaatatacagggactattattgtattctagcacgagttactttataaaacgagatagctaaacagtattatatggtggccagttgttacttgttctgttatctgtactctgagttgtgcacatctgaagcatatgaacagagtaactccctacactacctgaatcttctagaatacttctgtgtcatgtagaagagtaaaatgtctggccatccctgtaagcaagaatatgaaattataacagtatggtatctgttttgccacctgttgtcttggcattgatcattagaatgctacttcccagggacctcaatccaaaaccttttgcagttctgcttctgttggaggaaataatcactgtccgaaaggatagactaaggaagatgctaatcgctcaagtggatagatttttcaagcttcattcctgtattataataccagatagctaaacaataagataacataataactggtagggcaagccccctcataaatcgcaattacattggatttacagattaatttgtagagaactgacttatttatgctattgaattttccacgaatatgatacttctccatttatgggtttttacctttaatagtgttttatcattttactacataaaattcttgcgtatataatttgcttcaaggtactgaatagttgctatataataagtggaattttttctattttctaattggttataaatgtagaatttttagatgttgatgctacatctgcgtttatatacacacagatcttcagtcctgctgaactctcttattcattctgtgaattcccttggatttttgatgaagacaattatatgcaaattttgatcattttgtcccttgataattctcctacattctctctttttctctgtttaggacttcccgtgtgatatggaatagaaaaagtgatggtgagcttccttgtttatgattttgagaagcccacttttaataatcactacatttgaggtttgctctagggttttggtagattctttttattatgtttaaaattcttccccttaattcctaatttgaatgagtgttaaatgtatcaaaacttattttttccctaattaattcagctgttggtatgttctttttccctcctttaatgttttaacatactgaactacaaaggcaggtttcttgttttcctttaaagactgctagatttgattgctataattttatgtaggttttttgcatctatgaacaaaagtgaaatgggtgttgtagtttttctctacttcttttcctttctgtttttgatatcagtatcattctgtctgtatgaaagaagccgaatagttttccttttttgattcttttcttggaagctttttataattagagattttctgccctttgattaaaattgtgaaactgtctgagtctagtgttcttttattcaaggggattctttttgtctatgcatttagcttctttaatgattagatgtactatttctagaatagtttttggttatttctaaaataattttttgttctagaaaagtgttcatatcatgtatgttttaaaatacattagcataaactgagtctatggtggtatgtttgaaatcttgactgtatccataaccatgtacacccctccttttggtagctttccaatattgtttatttttgtctttttctttttctatcaagcttcctgggagatttatctgttttattggtcttttcagagaaccagctttggttttcttgctaatctgtgctattttaaaatttcattaatctttacagaaataaagacaaatgatctcttctaactggggtggattaattttttgttttttagtttatttacctcatttattgtttttcttatttcttaataaatatatttagtctttaaatttctctccaactgtaggttaactatattccaggacttgttttgatgtatatttcttttatggttatttagttctaaatattatacgattttcatagtaattatttagaagtgtgttttttagtttgcaagcacatagggttgtttgtttactgttgtctagtttttatttttctgagtatgtatgtgacaaggtcttgctctgatgtccaggctggagtgcagtggtgtgattatggctcattgcagcttccacctcctgggctcaagagttctcccaccccagcctcccgaggagctgggactacaggcgcatggcaccatgccatgctaatttttttttttttttgagacagggtctcaccctgttgcccagactggagtgcaatggtgtgatctcagcccactgcaaccttcatctcccaggctcctgagtagctgggactacaggcatgtgctaacatgcctggctaatttttgtattatattttttgtagtgatggggtttcgtcatgttgcccaggctggtctttaactcctggtctcaaatgatccaccttcctcggcttcccaaagtgctggtattacaggcccagcctagtttattttaaattgcattatgattagagaattgatgtgatattaagtttttaaatgtattgagacttatttgtggccaagtgcttgttcactttttgtaaaagttctatgcgttctttgatagaaaatgtatttattatttgttggctaatctgttttatatttgttcttcatgacatcggtatcctcaccttttttcttgttgcagctttattggtttctgttagaagtgtattaaaaatcatcaattataattatagtttaaaaaaattccttataatgtggccatttttgtttgggaatatcttgtttgacttatttaaatcttcttgattcattattatgcagtgtctatctttcttcatccctttatgttcaaactttgtatgtcatttatcagtaagagcattctttttataaccagtctgataatttctgcctattaataagtgaatttaatatatttacattattacataacttgaagttgtcttagccaccttattttttatattttctattatgtcttgtctttggttcttgtctgtcttctgctggattgaatgggttttcattatgtctttatttttagtgatgtggaaagacgttagaatgctttaacttggtgtcctctgtcttttaaattagataatattttactttgttgttttgaatacacccacacccagttaatcatcaatttttttatagtctgtactaatttagatttatcatgttttcagatatcttcataattctttttttccagattcaatttcctccttcctgaagtgtagaccctttattactttttgtgaaaacctgagtcttaaactctccagtctttttgaaaattgttactttgcatttattcttcaattacagtttatctgaatgtaattctagatggccagcttttccttctcagcccattaaagatatccttatattgtctgttggtaatataaggatagaaatgttagaatgtcagaaatgttaatgagccatctgctgtcagctttttagataattatgctggtagactatttttctctgttgttttgaaataatgatttggtagtttagggagtactctctttaaaattctgtattttcactgtgatgtatacacaggtggatttgttttctttattcttcatgagatccatgtcttcagtttgggaaattctcagcattagctcttgaaatactgtcattctctcctcttgggatttctttttttctcttttggagacagagccttgctctgttgcccaggctggagtggcagtggcacgatcttggctcactgcaacctccgcctcccaggttcaagcgattctcattcctcagcctccccagtagctgagattacaggcatgcagcaccacacctggctaatttttgtatttttagtagagccggggtttcgctatgttggccaggctggtctcctggcctcaagtgatcctccctccacctcccactgtgctgggattacagatgtgagccactgcacccaggcctctctgggatttcttttataacttctgttaagtaggaacataacatctgtcttcaatggatgttaacctgtcttttgtgtttttatccccttgttttctgtatctccttgtaggtgatttatttatatctgtcttctaattcactcattccttctatgcccattatgctgttcaacatatctgtcaaatttccttgagttcttaatttcagtgactgtgtttttcatttatgtaatttatatttggatctttttcaaattcagcattcttttatgataaaatctggctcttgcctaatgtttttctaagtgcattttttttttccaaattaatgctaattttaaaatctttttttaattgttatattatctcttgttcttatagtataaattttccctttcctcacatctgctgattctctctttcagtggcttgtttctttatgcaatttgttacctttctgaagtcatctttagcagtttgctttttgagagagtcctatatattctagatgagtaaatgttcctatagggtggttttcaatttacctttactagtttcgagttttgattgattccacgtcagctttcttctattttaaagtttttccatggtgtccttgtatcacctagataagatgaatttggacttccctcttgtttgttttaattactcacaagagaatcttttctacctgtggttctagtttcatttctgctcacctaaggttgtgggtagaatttttgtagtctgtgtttcacaggtgtatcccttcatgactcacatacatcagcttctagcttttaagctattttggcttctgttcctgtttgttgctctcactttgaattgctgctttattcttagtaccagggcatttcccttgcctgagtttgagcttagcaatatttcctccattacattttatctggcatttccatggatttagagtagcatagtcttctcagtcatcttggtccactatattaattggaaacttaatccttgtgattaagtccttgttagggaaatttgaaaaatcaggtaatggcactttaaaggcacctttaagtctttcttagatatttttcttttgaccaggtaatcctaagatataaaaatatttcttaaagcttcagactgttaaaggatatggtactaatctccccccctttttttttccctgggggtggagatggtgttttgtgttacttctgaatcccatgtctaagaaaaacaagatatctaatttttaaaatccttaacatgtctccttcacaaaacctcagaagatcctaggtggtctagaaatgtgacatctcaacaggagaaaaaagttatatgcttttgaatatatttattatggtgttaacctttaaaagtgaaaaggggacttaacaatagggacagagttcagtacattatcttaattgcaatttaatcgtatagcagtttaacatgcttctaaagattacgtgaagatagatattccttttatattgctgtgggaaaacagtacaaaattgtgtgtatgctatagatgaaaattggaagggaatattaaaaataaaaatggatggtggtggtaggattatgggcagtttttcgtttaaaaacaatttttttcaataatattgtcatccttgcagtcttaatataggaccaagtaaatagtatttctattcttgctagattccaagtagaatgaaaaatcataattaaaaaaggagtgacaggtagaggtcaaaatagtcacctttatttccgaggaagcttgatattaaagtatgtatctgaggtgtgagccacgttgggtctgctcactaaacctcacatttagctccccagttatagcaataccccaaaccagagcaggtctcccccataccgtgcccacttctgcccacattagagcagggcctgtctctggagaagcaaggttagaatttgcattctttgcaggtaggctaataacgaggaggtggtgagtggaacagagttgaactcacccagcttattcttcccaaatatattagataagttacgtcacttgaaattaatagagggccacagaaaggctaatacttagtgtttgagttcctactacaaggaaggaggaatcatggggagttgaggataagttcttaatggctgtgttcattttagagtaagaatgccatatgtatattttggcatttgttgattacgtcacttgataacgtgtaattgctgaagtttattttttatttttgttaagatcttcagtatatcccaattattttctgcttttaggcgtttaaatgcagaattgcaggcaaaaacagctgacgtggttcaacaagctaaggaaataatagtaagtatatgtacaattattaataattctatataaatgctagttttttatctttttcatttgatatatgacatatatacaaaacactagccaaagcatgtgtgttcagttcaatgaattattacaaattgaacatgaatatatatgcataggtataggaatgtatatatgtatatgtttttagtaagcacacattttctaaaagccactgaaaaagtactttccatttagattctccagtcatctaaattctcattataaattctcattattaattgatagaatagagcaactctccttagaggagtagtctactttaaaacttttatcagttcttagttaattttgattcttactttctatcctccctatgccccaaaatggagttgatggaagcagggaaggaaacctaggcaatattttatcttcatgccttatacaaatccatgattatttgttagtttaggaataagaaatgtatcatatataacatttcaagtaatatattttgataatggttacagatttgtattttataatttataattagatgttttactaaaaatatttataattaaatttatacttatatgttttactaatttataattaaatgttttactacaaatatttttatttcatcttttagtttttgccagtgtctgaaaagcaggaaaatacttgtacaaaaggaccccacgttatagtagaatgacagattcattacgttttctactcagagagccctgtaaaaagaatctccccctgcaaataaaaaacagaatagaaaactgggataagctaggaaaggggttggggaatggattcctacccctgcagaagcaaacaatataaggtttctcatatttaatttttatttactcactttctctttttaaaatttttaatgtttgtggttacatagtaagtgtttatggggtaaatgagatattttgatacaggcatgcattgtgtaataatcacatcatggaaaatggggtatccatcccctcaagtatttatcctttgtgttacaaaaaatccaattatactattttagttaatttaaaatgtacaattaaatgattttgactataataaacatgttgtgctgtcaaatactaggtactattcattctttctgactatatatttttttacctattaaccatccttatctcccacccctgcatcccccattacccttcccagtctctgataaccattcttcaactctctatctccatatgttaagttgttttgattttcagatcccacaaataagtgagagcatgtgaagtttgtctttttgtgcctggcttatttcactcaatgacttccagttacatccatgttgttgcaagtgacagggcctcattattttttatggctgaatagtactccattgtgtatatgtatcacattttatttatcgattcatctgttagtggacactttggttgcttccagatcttggctattgtgaacagtgctgcaacaaacatggaagtgcagatatctctttgatatattgatttctgggtcaaatggtatttctagttctagatccctgaggaatcgccacactgacttccacagtggttgaactagtttacagtcccaccaacagtgtaaaagtgttcctatttctccacatcctctccagcagctgttgtttcctgactttttaatgattgccattctaactggtgtgagatggtatctcattgtggttttgatttgcatttctctgatagccagtgatggtgagcattttttcatgtgttttttggccgcataaatgtcttcttttgagaagtgtctgttcatttcctttgcccactttttgatggggttgtttgtttttttcttgtaaatttgtttgagttcattgtagattctggatattagccctttgtcagatgagtaggttgcgaaaattttctcccattttgtaggttgcctgttcactctgacggtagtttcttttgctgtgcagaagctctttagtttaattagatcccatttgtcaattttgtcttttgttgccattgcttttggtgttttagacatgaagtccttgcccatgcctatgtcctgaatggtaatgcctaagttttcttctagggtttttatggttttaggtgtaacgtttaagtctttaatccatcttgaattaatttttgtataaggtgtaaggaagggatccagtttcagcttatacccaaaggactataaatcatgctgctataaagacacatgcacacatatgtttattgcggcactattcacaatagcaaagacttggaaccaacccaaatgtccaacaatgatagactggattaagaaaatgtggcacatatacaccatggaatactatgcagccataaaaaatgatgagttcatgtcctttgtagggacatggatgaaattggaaatcatcattctcagtaaactatcacaagaacaaaaaaccaattgctgcatattctcactcataggtgggaattgaacgatgagaacacgtggacacaggaaggggaacatcacacactggggactcttgtggggtcgggggaggggggagggatagctttaggagatatacctaatgctaaatgacgagttaatgggtgcagcacaccagcatggcacatgtatacatatgtaactaacctgcacattgtgcacatgtaccctaaaacttaaagtataataataataaaataaaaaaaagatatattgatttcccctcttttggacctatacgcagcagtgggattgctggatcatatgataactttagttttttgaggaacctccaaactgtttcctttgtagttgtactaatttacattcccaccaacagtgtactagggttccctttctctacatccttaccagcatttgttattgcctgattgcctgtcttttggatataagccattttatcagagttgagatgatattgtagttttgatttgcatttctttgatgatcattgatgttgaacacctttttttatgcctgtttgccatgtgtgtgtttttcttgagaaatgtctattcagatcttttgctcatttttaaattggattattagattattagattttttttcctatagagttgtttgagctccctatattttctacccttgtcgatgggtagtttgaaaatattttctcccattctgtgggttgtctctttactttattgtttccttcactgtgcagaagctttttaactttatgtgatcccatttgtccatttttgctttggtgacttttgcttgtggtgtattactcaagaaatctttgtctactccaatgtcctggagagtttccccaatgttttcttatagtaatttcatagttttgagatcttagatttaagtcttcaatacattttgatttgatacttgtatatggcaagaggtaggggtctagtcttcttcttctgcatgtggatattccgttttcccagcaccatttattgaagagactgtcctttatccagtgtatgttcttggcaaccttgtcaaaaatgagttcactgtaggtatatggatttgtttctggattttctctattctgttccattggtctgtgtgtctgtttttatgccagtactcagatgttttggttactatagcaccatagtataatttgaagccaggtaatgtgatttctcaagttttgttctttttgcttagggtagctttggctattctgagtctgttgtggttccatataaattttaggattgttttttctatttctgtgaaaatgcgattggtattttgcaaggggttgccttgaatctgtagattgctttgggtagtatggacattttaacaatattgatttttctaatccatgaactggaatatctttccatttttttgtgtcctcttcaatttcttgcattgatgttttatagtttttgttgtagagatctgttactgctttggttatgttaactcctaggtattttatttgtggctactgtaaatgggattacttttttatttattttttagattgttgacatacagacacactactgatttttgtatgttgatcttgtatcctgcaactttactgagtttatcatttctaatagtttttggtggagtctttaggtttttccaaatataagagcatatcatctgtaaatgaggttaatttgacttcttccttctgatttggatgccctttatttctttatcttgtctgattgctctagttaggacattgagtactatgttgaataacagtggtgaaagtaggccagatcttaaaggaaagacggtcagtttttcccattcggtatgatactagctgtgggtctgtcatatatggcttttattatattgaggtctgttccttttatactcatgttttgaagtgtgtttaccatgaagggatgttgaactttatcaaatgcttttccaggatcagttgaaatgatcatatggtttttgtccttcattctgttgatatgatatatcacattgattgatttgtgtatgttgaaccatccttgcatccctggggtaaatcccacatggtcatgacaaatggtctttttaatattcagcaaactgaattctgtttgctagtattttttgaggatttttgcatcaatattcgttagagatattggcatgtagttttctttttttgatgtgtctttggttttggtttcagggtaatactagcctcataaaatgagtttggaagtattccctcctcctccaatttttggaatagtttgagttggtttggtattagttcttctttaaatgttcgatagaattcgcagtgcagccatcaggtcctgggcttttctttactgggaaaattttttattgtggcttcagtcttgttacttattattgttctgtttagttttggatttcttcatggttcaatcttggtgggttgtatgtatgtgtctaggaatttatctgtttcctctagattttcctatttattggcgtatagttgctcatagtagccactaatgagcctttgaatttctgcattgtcagttgtaatgcctcctttttaatttcatattttatttatttgggtcatctcccttattttgttagtctgttaattttgctcatctttaaaaaaaaccaactttttgtttcattgatcttttctttatttcaaattcatttatttttgctctgatcttcatttcttttcttctactaattttggtttggtttgttcttgcttttctggttctttaagatgcattgctggctggatgtggtggctgatagctgtaatcccagcactttgggaggccaaggcacgtgactcacttgaacccagaagtttgagaccagcctgggcaacatggtgaaactccatctctaggaaaaatacaaattagtcagatgtggtggtgcacgcctgtagtcccaactacttgaggggctgaggagggaggattgttgagcccaggaaggtctaggctgtagtgagccatgatcatgccactgcactacagcctgggcaacagagtttctctctatctcaaagaaacaaaaaaaaaaaaagaaagaaagaaaaaaaaagaaaagaaagaaagaaaaagaaaagatgcattgctaagtcatttatttgaagtttttgttcttttttgttgtaggcacttacagctgcataaatttccctctcagtactgctttcactgtatcccatagatcttggtatgttgtgttttcattatcatttgtttcaagaaatttctcagtttccttcttagtttcttcattgacccattggtaatttaggtgcatatcatctaatttctatgtctttgtatagtttccaaagttctggttattaatttctagttttattccatgtgatcagagaagatgcttgatattatttcaatttttaaaatattttacaacttgttttgtgacctaacatatggtctgtccttgagaatgatatacatgctgaggagaataatgtgtatctgtagtctttggatgaaatgttctgtaaatgtctattgggtccacttgttctgcagtgcagattaagtctgatgtttgttgagtttctttctgggagatctgtccagtgctaaaagtgggtgctgaagtctccagctattactgtattgtggtctagctctctctttagctcgaataatatttgctttatgtatctgggtgctccagtgttgcatgcatttatatgcaatcattatatcctgttgctggattgacctctttagcattatataatgaccttctttgtctcttcttacattttttgttttgaaatttattttgtctaagtataggttctcctgctttttttttttggtgtagaatatctttttctaccctttttattttcagtctatatatatatctttattaagtaaagtatgtttcttgtaagcgacagatcatggggtcttgttttatcatccattaaaccagtccgtcttttgattgaagagtttagtgcatttacattcagtgttaatactgataagggccttaatcctgtcatttcattatttgttttctggttgtcttgtggcattccttcctgtcttccttttattgaaggtgattttctcttgtggtataatttaatttcctgatttttattttttgtgtggtcattgtatgttttttggcttgaggttactgtgaggcttgcaaatactatcatataacccattgtttaaagctgatgacaacttgacgctgattgcataaacaaacatgcaaaaagaaaactaatacaaactctacactttacttttatctccctagtttttaacttgttgttactgtttctgtcttactgtactgtctatgagttaaaaagttgttgtagttattatttttaattggctcatcatttagtctttctactttagagtagtttacactcaattacagtgttataatattctgtgtttttctgtatgtttactattaccagtgacttttgtaccttctgatgatttcttcttgctcattaacatccttttcttttagattaaagaactgtctttagcatttcttgtaggacaggtctagtgttgatggaatgcctcaacttttgtttttctgggaaggtctgttattatctttcatgtttgaaggatatttttgctggatatactattctaaggttaaaatctatatttttttcttcagcactttaagtatgtcatgccactctctcctggtctgtaaggtttccacggagaagtctgctgctagatgtattggagcttctttgtatgttgtttgtttcttttctcttgctgtttttaggatcctttctttatctttgacctttgggagtttgattattaaatgccttgaggcagtcttttttgggttaaatctgcttggtgttctatagtcttcttttacttgaacattgataactttctcaaggtttgggaagttctctgatattatcccttcgaataaactttctacctctctctttctgcctcttctttaaggccaataagtcttatatttgcccttttgagcctattttctagatcttgtaggcatgcttcattcttttttcttttgtctcctctgtattttcaaatagcatgtcttcaagattactaattcttctgcttgatcagttctgctattaagagactctgatgcagccttcagtatgtcagttgcatttttaactccagaatttctcgattctttttaattatgtcaatctgttcgttaaatttatctgatagaattttgaattccttttctgttacttgggtttctttgagctttctcaaaacagctattttgaattcactgtctgaaaggtcacatgtctctgtttttccaggattggtctctggtgtcttatttagctcatttggcaaagtcatgttttcctggatgatcttgatacttgtagatgtttgtcactgtctaggcattgaagagttaagtactgtagtcttcacagtctgggtttatttgtgccagtctttcttgagaaggctttccagttatttaaaggcacttgggccccctgcccaatatcactagggtttttgcagacttgtagaggccttggtggtcttggataagatctgaaagaattctctgggttaccagacagagactcgttctcttcctttattttctcccaaacaaatggagtctctttctctctgtgctgagctgtctgaaactaggggtgtggtgatgcaagcacccctgtgcccagcaccactgggattgtgctccgtcagacctgaagccagaacagtactggatgttgcccacaacctgctataaacactacctggctaccacctatgttcactcaaggccctagagctctacaatcagcaggtgatgaggccagccaggtttgtgtccttcccttcagggtagcgagttcccccaggccctgggtgggtccagagatgctgtctggtagtcagagattgaagttagaaatcttagaaatttatctggtgttctagtgttttgtggctaagctggtactcggactacaacataaagtccttcctgctgttcactcccctttccacaggcagaggagcctctccttgtggtcaccaccaccaccagtccatagcagggttctgccaggccactgctagtgttcacttaaagcccaagggcttttcagtcaggtcgtggtgaatgttgccaggcctgggactcacccttcaagggagtgggctcccctctggccctgggcaagtctagaaatgctgtctaagagtcaaatcctggaatcaggcaccccaagagtccacgtggtgctctgccctgctgtggctgtgctagttcttaaggtgcaagacaaaggcccctttacttttccctttgctttcacaagcagaaggagtctttcactgtagccactacaactgggaatgtgctggatcacccctgaagtcagtatgtctcagagcccaaggcccatggcctgctattaataccttggtattgctgctggttatttggggcccaaggtccctttatttagcaggtgatgaatgctgtcagaactgggtccttcccttcaaggcagcagattccctcttggcccaggatgtgtctagaaatgtcatttaggagctagggcttgtaatggtggctgcgtgactctgcctggcaccctgttggctgtcttccatggccgaggtggtatccgagatgcaagataacatcctctttactttttgttctcctctccttaaacagaaggaatgagacacttttgttgctgtgaactgcactgcctggtgttggggaaggcatggcataagcaatcctttagtgccctggttggtgttttcctaggtcacaattggtgtctccctaggtgccagcctagtcctctggctctgagtcaagcccagcactaggatttgcctagaaaatggagccattgtatcctagactgcccttcaagtttacctaggaccccagagcactttggccagtagtggcaagacttgctgacaaactggagttctgacccacaggatgggtgattttcctctggctatagctggtccagatgcttcctccatgcatgggtactcaaagtctccgccccgcatgactttgctctccactctgacagggcagcactgagttcaatgcacagtcgcccagtcactgtgctgtccctcccctaagtgcacagactcttcaggctgcacagccactgcaggagtgagtcaggaaggggtggtgtcagctttttaagtctctccaaccttcttcaatgcctctttcaatgatatgaagttaaaaccaggtactgtgtttgctcacctgatttttggttcttgtgatgatgtttttgtgtgcaggtagttgttaaaatttggtgttcctgcagagggaatgaatagtgtaggcttctattccaccctcttgcctcactttcatttcttgatgtgtctttgccaaaagcttttacccctgatacttcacttttagcatcttcacagtcttctcaacattgaagtttttcctgatttgagacaaatttttctacccatttagtgaatttattttttaaatttcttgtgcctccttctaatttctgctgtatgctgtataagctggaagactctaaagggctggggaaactggagttagaaatattatgtaaaggccttgatattcttacattttccccttaggatggaattttttaacccagaacaaatgaaaggtgcaactagtgttatagaccttatcttcatactatagcatttagaattccgtgcctttatgttatggaaaccttggacaattctgaaatgatgaatgttcagagaggcacttgaatatatcttaatggtttggttttttttctatatgatatattacctatctttactcatttaagagagatcggcaagaagtacgatctaggcctgtttcaacacaaatgaaatcatgtgatgacgaagatgattacagtttaaggtaagtatcttaaattctcaagcaccttcttttaaaaggatgtacatggatcgttatgtaagatcttttttgcatgcaaacattgaaaaatctataatttgaagaataatgtatatatagggggcttataccaatcagacacagtgcaagccctttatctcatgtaattttcaaaatattattttgaaatgtatattcttgtcctcatttttaaaactttagagaggaaacaggaaaagtacataatcgatgtgaataaaactatgaaatcatattgtagcagacggaatgatgatcaccaaacattccaagtctcttacagttgtcattgggctatgaacagaagtttagttaatctcttccaagccaaaacagacaaaaattggtgtgtggacctccaaatgactttccagccatgaagatgagtaaaattccaattggtaaaatctcctagcctggtgtctgggtgaccgtgtgtggaccatgtagaaaaaaggatctttcttcgtcactactgctgcattgaatgggttaagccactggaatttttaggttactatcctgcttatctttgctaatgttgaaattggtattgggaatggaatgctgcataacaaaaattcagaagtgtggcattaccttagcagttaggtgggagccagcaaggaaactgatattggaggctggaaagataaaggattaatattatgtagtggcaatgaatttagtaaaactatcatctgtggtaaattgggaggcacaacaggtgtctaatgaacttgttctctggggaaagaggctgaaacacaatatcaacagtatgtcctgttaaagagacaagtttgggaaacatttggctgatttgtaagcagaaataaaagggaatacctgattatctaattcagagtcacaaagatttacgaccatgatttctttgaagagctttatggttttaactcttagattcaggttctttgatccattttgagttaatttttgtatgtggtataagagtcaacctccattcttttgcacatggatagccatttgtctcagcattatttgttgagaagactgttctttccccattgaatgttcttagcacttttgtcaaaaatcagttgactgcagacatatggttttatttttggactttcatatctgttccattgatctatatggttgtcattatgccaacagcacactcttgattacccttgttgtaactgtggagttgtggagtaagctggttttagacctcaagaattacaaggtaaaattgagaaaatctgtaaggaacaaaagcctatcaaaattcaaccttgagacaaatatcagactaaacatgtggacttcatgactactgatacaatttttcagtggattaaggctcctcaatgcaaggatcagattaaatggcacatagtgaaacttttcatttgggtaaaatggcccatggcaaagacctaactaaagttatagtctctccttagaagcttgacagtgttaaagtaacccatttttaaattgagaaagagaggtcaggtgaagaaataaataaataattagtcttggaaagaattgtaggtgatgtaatggcatgtagaactggctgaaattaaatagggaagaaacccactagtttgggggaaagttttatcagcaaagaaactctaacaatggactataattatttctggcttttaaaatattaaaacaactatgggtaccccgccttccagtattctaagatcaagaagtaggctataagaggtgcatagccctacagggtttagagacaaaagagaagcttattactgacatggcagtatatttggctcatgtgaaatattgggacattattcatttattcaaaaataattattgcatgcgatccagtatttcccttcctagatatttacccaagagaaatatagacatatatccacgaaaaaacctgcatgtgaatttttagatcaattttattcataattaccaaaacctggaaataattaaaatatttatcaattggtggctggataaacaaattatggtatatccatgcaatggaatactacttggcaataaaaagacatgaactactaatagaataacaacatagttgctaagtgaaagaagccgggctaaaaaacgtccataatctatgttttcacttatttgatgctctggaaaaggcagagctttagggacagaaatcaaagtggttgtctggggcttgagtaggagttaggggactaccaaggaacacaagggaactttttgagatggtggaaatactctctgtcttggtggttgtggtggttatgtgaccatatacattagctaaaacatattgacctgtatatgtaaaaagagtatattgtgtgatgtatcaattatatctcaaacctgaaaaaaataatttttgaacactgttagtgccagttctagctactggtattacagtggtgagtaaacagacctgatcttgcttccaagaagttaatatgtgttgcttttgagtattttttaagtacatcaattacacatttttatattttgatagacatatgtatgcgtacatataccatgaaaccacttatctttattatatgtaatactgtgatattctatgaaaaatagatatttaagttatcaaaattccaaactttggattatacataagattagacatgatgtttatccagtaaactaaagaactgaaatgatgctaacaacagatgatgatgttgtgatgatgacgctctgtttacctatcagtttttttttaatgcaactgtttgaacagatggcttttaccatgtaaaacatggcatttgttgatcagttgggaattcctgaatatgggagataattctataaagaaaccattcatttcaggttggaacaatgatattccacctaaataattataattaggaagaatatattttaataggtcttcaacacccaggatgactctgtcaaaaaatgtgatgggaaaccagagtttaatttcctaataacgtagtatacgtatcctccagtctgcttgaagcatggtttaccatacagttatttccatcatattacaaacagacatttcatggagttaaacaaaagtaagaataccatactatagcttacttttcatgaaaatacactagcaaagtaatatcactgtgaaatctgatggagacagataacccttaaatgtcttttggctgatatgtatgcatgtatgttggggaatggaatgaaaggtacagaaaatgtactaaaatgacaaacattaatttaaaatgaggaagattaaagaggacacttaaaatttgtataacatttggaaacattttcatgtcatttgtgagaatgatttagtttctgtaatttttaacatattttgaaagcctttttttcttcccagaggtatttctaatagttaagaggtttatttatctaagtatatctttgtatttaatatgaaaaaatttatgcatggctagctaagtgggaggcatctgatggaaaataattttagttgtatgtcttctccaatggttaggagttctcaggggatatagtggagttttttcatagcaataatggatgctaacatggtatgttttcagagatataaatacaatgcccaagacaatgggttaggcaaactttttctgtaaaggggcagatagcaaatatttttagatttgtgggctgtatagtctgttgtacctgcttaactttaaggttgtagtgtgaaaacagccatagataatacataaatgagtgagtgggtggattcagcctgtgggccatagtttgcagacctccataaacactccttgtttgaaactacaaatatattttgaaaaccttgtgtataaaaatgaattgcattttacgtgtatttattcatgcactcaacaaatacttacgccagtagtacctggcatataaacttttaaattgactaggcatagaatattgaacaaggcagacgtgatttctaccctcatagagttcacaatataatgaggaaaacaggcactaaccaggtgttttaagtggattaaaagaacagtaacattgagtgggcttacaataaaaagccctgtggtgaattatttgtaaaatgggtaattgctgtggatagcccacaattactctttatgatttccattcattaaaatttttgctacattttcctactagaatattggcattatagtgtatcttctcaaaggtgaattatttaaccaaagcatttttcttgtttatggtactcattcaaaataaattaacatgtgggtaactagaattatagcaaagtctgtttgattgttgaatattttccctttcaaatataattgttgaatttcattgtctcagctcagtgtcatctattattaatgtataatgtttatttttggcctgtagaggtctgttaccatctgaagggatagttcatcttcattcagaaactaaggtatgaaatcaaactttctgtgaatgcaattatattctgtagaactccggatattttttagacttttcttagacaaagcagagaaggggtatgactcaacagaaatagaatatgaaccttgatactcagagggatgcatttgtgaagtgtccctcataaactaaatggaatcctttgttgtctcataatttcactgaataatttggaggtatagtggaaaaaatgctaggtgaaatgactttgtaaactgaggcttatttttttttcctgacgcttaaatctagtagagagaagacttgaaaaagaatgatactcatatacaaagaaggtgatttgaaaagtttgtttgttcatttaaatagtgacagtgtagagatcactcttccaggtgtagaacatagtgggatctatgtttcccatccatggagacctaagccaagggaactgtatacctgaaggccacgggaggtctgcctggggaataattggttcatgaggagaactaaattctgtgagtcagaacgtccagatttattcatgacattccactggctagctgaataccattgaatctttaggactcattttccttatacttgaatttcttggttttggtgttatctaggtcttttccagctatacagttgtgatattcttgaaaacacatttttggtaattccatgaaaatagcaaatagcagtttttctgtgtagcaaaattctatgtgttacagaattgctttctttggcaaatgattagactctaattagtcaatactttcaattcttttcatgtagccaaagaccaaaaacattgatcctgtaaacaaggttcaaaacaaattacactctgcaaataaaggaaggaaaacaaattcaaggtatagtatagttttcaaagtatttctttttttttagttttgtaattcacaataccatcattcttaattattaagctctgtttgtttttccagatctttttacaccctaaacattaagttacaccacatatatcttatccacattcagtaatttagaacattttctactcaggaatgttttgcagcagttaacaaatattttatattgttctcttaagcaaaattgctaaatctaaaatttttataaatgttatttctagtgagttattctcttagaactgtgactacaactgggttttttttttaatctctgcctagttctcccaaataggctcaatagtgtagtttttgagtatttgacaaaatgcatatattattttgtctgttgagctacagaatgatttggcatgctctaaataggactataatataattataatttacattttgttgttttgggtgagaaagaattcaagacggttcttagtattataagcataaaaagggacccaagatgctccctaggataggatgccttctagaaaaggtggaggattgggttgcaccaaccatcttcagtaagttattaaatttatttgtctattacttacccaggctgatcattgtattgtaattctggaaaaatctttgttcacttttgtgtcttaattgtttaaataactttttttttttaataaaagggatggaaaaaatagagtgaagtgataaggaacagaaattaactatacaatagattgaagaaaagaacatacatgccacatacatgcatatataactggaaagggttatcttttcagacttcacatttttttaaaaaaagttgatttttcaaatagaattctgaagatcaagacctactatttgatagcacaatagggtgacgatagccaataataacttaattatatttttaaaataaagagtgtaattagattgtttgtaactcaaacaatgcttgaggggatggatacccccttctccataatgtgctcatttcacattgcattcctgtatcaaaacatctcatgtacctcataaatgtgtatacctactgtgtacccacaaaaaattaaaatgaattgtgaagcctttgcttatgttttaaaagtgaacttggctttcagaaccataaatttgttgatgtgtcaatgaattaggcctggactattcctcagtgcctttagaaatgagtttgattttgtctgtcttctccttttcattaaaaaaaattcacatccaactttttggttagtattgattgtggttaagaatgtgtttctttgggtggaaaaaatgttgtttgattgagctattagctcttcactctgtaattctttctcaaggggtatttttctttgctgtttgtagaattatggccaggatgatgtcagtttgtacagtttttctctagaagcgtgtaaatttaaaagtcataggctggatttgacctaggaggccaagtgcaatactcttagttttggtattgccttatttggaagcaaagtctataccatctggcctcataaagccttctctagctctgtggtcacatgattcataaaaaccaaaaatctgctaagtctcttgtaatatagtccttgaaagtatcacatgtagatttcatcataaatttaaaatgtgtaatagtagtctcttgtaatataatccttaaaaatatcaattacagatttcatcataaatttaaatttataataattttgatctgcttatttgggtaaaaggcatatatcctgtctacctttcctattttgttcatatgtacgtatatacatacatatgtatttaatttttattttttagtgttaaattgaaatactctgatgtccaaactgccgacgatgttgccattccagaggatttctcagacttttcccttgcaaaaacaattagcaaaattgaagggcaactggaggaagaaggcttacctgaatatatagatgatattttttctggtgttagtaatgacattggaacaggtagattttctttagttttttatttttatctttatagcacagttacttagaagaagaaatcttggggaactatttcttccatttaaaaaaatgtattgtgatgtcttggtttgtttcagaattatctagtaggatgtggtggagggaggaatgaatgggattatagattaaataaaattggccatgggtcagtcattgttaaagataggtggtgggtaaatgaggttcattgaactcgcctacttttatgtttcatattttccattataaaaagtaaaaataaaaaagactatattgtactgatttgattgaatacatttcaacttaagttaaaatacccattgcttattgttaaaatattaaaaaagtttttctgaattttttcatttactgttaatatattttatttattgcatgttaaatcaacacatgcaaaaggacaaatgaattgacattgcatcaggtaaaacaatcaaatgagtgttctaatgaatataatttttcttcttattaactcattctttgcatatcactagaataataatactaaattttgatcaactgaaaacattagtaaatttatgaggagcctcctatgctattgaaacaaaaaagtaagacaattgagtatatatgaactagttactgctgaactataatacaattaattgtgactacaggcaagccacttagcccctctgtaatagcagtttattcatttgaaaatttagtagtttgtattagatgatcattaagtttatgtattagtctgttcctgcactgctataaagaaatacctgagactgtgtaatttataaagaaatggtttaattggctcatggtactgcaggctgtataggaagcatagcagtttctgcttctggggaggcctcaggaaacttccaatcatggcggaaggcaaacagggagtgaggcatctcacacggtgggatcacgaacaagagacgggggaggtgctacatgcttttaaacaaccagatttcatgagaactcactatcatgaggacactactaaaagggatgatactaaaccattcatgagaaaccacccccatgatccattcacctcccaccaggccccacctccaacactggggattacaattcaacatgagatttgggtggggacacagatccaaaccatatcagtttatctttaaaattctctgattctgtgaaaaatcataatttatatgtataataattattgtgttactaatcacaagtagggagcagttttcttctgcacttactatatttactgatctaatcaagctttctagggctagttatggtaagggaaggtaaatggagcagtaagttgcctttaggtctctctaagatgctttagaggatgtgatgcacaggcattgattgttcctcggtagaggaacatggtcccatgtcccatggccctgttagaactttgcctccctgtgttccctttttagtatcactggcctaggtgtcttctcttttgggagaattttctcttattttagatgattgcttggaatggtttggttatgtgtgggagaaaaagaccaagaggtaatttgggagcacagattactttgtaagattaaagctagggtcgagtggggagcagagtttagtactgtgggcctccagacatgggagcactctgctccttgagttagagttgaggtagagttactaaggttagagttagggagaaaaagaaatgggaaaagtcatgctttcctattttttcttccctctttccctcagaggccaactactgtcaacttcaccctttttaatttgtcatttccctctactccctactcacctggagttacatgagaggctggtaggagagttgaggccaaagagacctaggtagggttagagccaaccataattcatcagctccatgataacactgagggcacttaaaaaagctggaagtgtgtatggagatgttttatgctctgcacgtcacatgtgtatggcttagtgagatttgtcctaatgacttctcagagcagttccaagtgtttcctcaagataaattccatgatggtaagggttgttttataatattcctactatgccattttgaacaaatcactgaatgacttatgagtgagttctaagttcagttttcactttatttactttatgggcctataaacttcaaagatttactgctgatattattgaataatgaacttttgctggcagtaaagtaccaaagatagatcctgaaggtttgtgggagaaagcttagacagtaaggtattagtgtatttctttgcttcaaagacacatatactacattttaactgctcagaaattgggatctgtgttacagtcagtggcattttgtaatcacagtggctgcactgaagctgagttttgctagagaagatttatgtttgtttctgccaaactctcagggacattactgacctgagaacactttaaataatctgatgtagtttggaccaccctggtgcgtgtgaatttagtctgcaaacttatgtgaatactacctgtgatttctttctgttgagtggatttattcgtcattgaccttttcattaggactgttgagtacctatagtgccccctaacagatatctcctatttgactccccatcttgagtattttcttctttataaagtaatggtctgtcttacaattgatgtcatcttagattcagcaaaagacagtaaatataattatttaaattcacagaagcacagatcagatttctaaaggccaaactccatgttatgcaggaggaattggataatgttgtatgtgaatgcaataaaaaggtaagttttaaaaacctcttaaaaggctctaatattcaaagatattttaggagcaatttcaattacattttttgaattactttatttagatataaatcatagttaaattttgaattcaaaaattgtatataagtactgaactttattctgagatgttgaattttcacagagctgaaatatcttaaattcttgctacaattagaattctctatattagtcttacaaatgtagtgtaagctattaaatgcaaataaaacatttgacttccatttttgaagataaaaatagactaatttgtttttcatgaaacgtgtataaatatcaaagaacatatgaaacgtctttttttctgctttgttttgataacaaatcttacatattttttcacataatctataactttataactataggaggatgaaattcagaatttaaagtctcaagtaaaaaattttgaagaagattttatgagacagcagcgaacaattaatatgcaacagtctcaagtagaaaaatacaaaactcttttcgaagaagcaaacaaaaagtatgatggattacagcaacagttgtcttcagtagaaagggtaattatttggtatttttcctaacttaatgccacagatacaagaaaattattaaggttacacatttgtatagatgccattttgacagttcagttattttattagtatttactgaaaactctttccccttacatagaatatttttaacaactttattgagatgtaattcacccttttaaagtatgcaattcaatggcttttggtgtattcatagaattgtgcaactatcaccacaaccattttcataatccctaaaagatacttcataccctttagccaccacaccctgaccctgctcccctcaatcccttacagccctaggcaaccactattctattttatgtctcaataaatttgtctattctggaaatcacatatacgtggaatcatataatatgtggtcttttgtgactgacttttacttaagatattttcaaggttcattcatgttgcagcccctatcagtattttatttctttttattggcaagtaacattctgttatatggatataacacatttaatttatctgtttatcagttcgtagctttaggttatttgggttgtttctactgtctgacaattttaaatactttgaatattcatgtacaagtttttgtgtgcacgtatgtttctatttctcttggttatatagccaggaatggaattgctgggtcatatggaaatcctatgttgaccttttgaggaattgctgactgttttccaacctgcctgtaccattttacattcctaccagtagtgcatgaagctcctaatttctacacatcctcaccaacatctgctagattatctttttgattatagccatactgcaagtgtaaaagggttacctcattgtggttttgatttgcatttccctaataactaatgatgttgaacatcttttcatgtgcttattggcatttgtatattttctttggagaaatgtctgttaaggtctttgcccattttttaaattggatttgaaaaaattactgaataataagaacttttaagttctttatgtgtttagatacaagtcccttatcaggtatattttgcaaatagttttcccctacagtgggttgtctttcactttctttatggtactctaaaggcacaaaagttttaaattttgatgaagtccagtttatctaatatttatttggtttcctgtgcttttggtgtcatatttaaggggagaatgtattttaaataaactatcctagcttatattagtgtgccattgtgaaaataaaaatatactgtttgagattgctttgtaaaatgtagtgacgataagaattatgtaatatagcatatcccgagatttagtaagaaaatgtgccccctttattagtacccttacatttctcgtttgtatggtcatatttaaaaaccctgctttttaaacattttggtcttgtataattagctttatcttgtaataaattttaatatcaaaatcacttagacaaaatttatatgcagtaaattcacactttttagtgtacaattctatgagttttgacaaatgtatgcagtaatataactatcactataattgagacatagaacagttccatcagccccccaaaattccctgtgaatttagtgaaggccttccctaattccaccaccaggcaaccactgatctgtgtttggttcttaaattttggacttttcccaaatgtcacataaatagaatcgcattggatatagacttttgaatctgttttttttttttttttttcagttagcataaaacatttgatatggtttggctgtgtccccacccaaatttcatcttgaattcccacttgttgcgggagggagccggtgggaggtaattgaatcatgggggcaagtctttcctgtgctgttcttgtgatggcgaaaaagtctcaggagatctgatggttttaaaagggagagtttcccagtgcaaactttcttgtctgctgctatgtgagacatgccttttactttccaacatgattgtgaggcctccccagccatgtggaactgtgagtccaataaacctctctcttttgtaaattgcccagtcttgggtgtgtcttaccagcagcatgacgatgaactaatccagtaaattggtactagtagagtcaggcgctactgaaaagataccaaaaagtgttgaagtgaccttggaactgggtaagaggcagaggttggaaaagtttggagggctcagaaaaatacaggaaaatatgggaaagtttggaactccctagagacttgttgaatggctttgaccaatatactgataatgatatggacaatgaaatccaggctgaggtgatctcagatggagatgaggaacttgttaggaactagagcaaatgtgactcttgttatgttttagcaaagagactggtggcattttgtccctcccctagagatctgtggaactttgaacttgagagagatgatttagggtatctggtggaacaaatttctaagcagcaaagcactcaagaggtgacttggtgctgttaaaggcatccagttttgaaagggaaacagagcacaaaaggttggaaaatttgcagcctgagaatgcagtggaaaagaaaatcccattttctgaggagaaattcaagccggctgcagaaatttgcataagtcttgaggagctgaatgttaatccccaggacaatggggaaaatgtctcccaaggtatgcagaggtcttcacggcagcgcctcccatcacaggcccagagacctaggaggcatgattggttttgaaatgtgaggacatgagatttgggagggtcttggggtagaatatggtttggctgtgtccccacccaaatttcatcttgaattcccatgtgttgtgggagggacccagtgggaggtcattgaatcacaggggcaggtctttcctgtgctgttctcatgagagtgaataagtctcaggagatttgatggttttaaaaatgggaatttccctgcacaagctctcgtctgccaccatgtgagatgtgcctttaccttccagcatgattgtgaggcctccccagccatgtgaaactgtgagtgcagtaaatctctttcttttgtaaattgcccagtcttgggtatgtctttatcagcagcatgaaaacggactaatacaacattcaatatttatccctattatagtccattcctttttattgctgagtagtgtaaactatgaatgaatgtacttcagtttgtttccccactcatctagtaataaaagttaattatagtatttaatagtctgaacttgtgtttccagtatggtagccacttaccatatgtggctaaattgcgatgtgctataactataaagtaaaaatcagattttgaagaattcatgtaaaacagaatgaagaatgtaaaatatctcaaaatctctttaatattttttgtattggttatatgttgaaataatatttgaatatattaggttaagtgaaatatgttattaaaattaattttacctgtttgttttaccttcttgcagtggctactagaaattttgtaattacatatgtattctgtattctatttctattggtctaagaaatatatataattggtctaaagggaaaaagctgtagtgtctaggggaacatccatgttttaatttgtcatgactttaccatttaccgttatgcacccaagctctgtcacatcactgttctagtctcagataatcttgaaaccttggttatatatttgattcttttcatgttcttggccatcatgtccaatcctgtgcaatttttcttccaaatgtttttcattcatcccttattttcagttcccattttgtgtccattttccatttcttatccattgtatactgtactttgtcagtagattaatgttgccaaagggtgacattgattatacttttccctttgtagggggagaatttttttttccctttgtatggggataattttttgagtgccatatgccagacaaaatgcattttatagaaacggaaactgactggccaggcatggtggttgatgcctgtaatcccagcactttgggaggccaaggcaggtggatcatgaggtcaggagatcgagaccatcctggctaacatggtgaaaccctgtctctactaaaaatacaaaacagtgcccttctaagatggccaaataggaacagctctggtctgtagctcccagtgtgatcaacgcagaagacaggtgatttctgcatttccaactgaggtacctggttcatctcactgggactgattggacagtgggtgcagcccacggagggtgaactgaagcagagtggggtgtcgccttacccgggaagtgcaaggggttgggggatttccctttgctagccaagggaagccatgacagactgtacctggaaaaatgggacacttctgcccaaatactgcgcttttcccaaggtcttagcaaccggcagacaaggagattctctcccgtgcctggcttggcgggtcacacacccacggagccttgctcactgctagtgcagcagtctgagatcgaactgcgaggtggcagcttggctgtgggaggggcatctgccattgctgaggcttgagcaggtaaacaaagcggccgggaagcttggactgggcagagcccaccacagctcagcaaggcctactgcctctatagactccacctctgtaggcagggcgtagctgagcaaaaggcagcagacaacttctgcagacttaaacgtccctgtctgacaggtctgaagggagcagtggttctcccagcatggcgtttgagctctgagaatggacagactgcctcctcaagtgggtccctgacccctgtgtatcctaactgtgacacacctcccagtaggggccaacagacacctcatgtaggtgggtacccctctgggacgaagctcccggaggaagcatcagccagcaatatctgctgttctgcaatatttgctgttctgcagcctccgtgggtgatacccaggcaaacagggtgtggagtggacctccagcaaactccaaaagaactgcagatgagggacctaactgttacagggaaagctaacaaacagaaaggaataggatcaacatcaacagaaaggacatctacaccaaaaccccatctgtagttaccaacatcaaagaccaaaggtagataaaaccacaaagatggggagaaaccagagcagaaaagctgaaaattctaaaaaccagagcacctcttcttctccaaagaattgcagctcctttccagcaacagaacaaagctgcatggagaatgaccgacgagttgacagaagtaggcttcagaaagtcagtaataaacttctctgagctaaaggatcatgatgttctaacccaacacaaggaagctaaaaaccttgaaaaaaggttagacgaatggctaactagaataaacagtgtagagaagaccttaaatgacctgatggagctgaaaaccacggcacgaaaactccgtgatgcgtggacaagcttcaatagccaatttgatcaagtgaaagaaagggtattagggattgaagatctaattaatgaaataaagtgagaagacaagtttacagaaaaaagagtaaaaagaaatcaacagagccttcaagaaaaatgggactatgtgaaaagaccaaatctacatttgattggtgtacctgaaagtgatggggagaatggaaccaagttggaaaacactcttcaggatatttcccaggagaacttccccaacctagcaagacaggacaacattcaaattcaggaaatacagacaacaccacaaagatactcctcgagaagagcaacaccaagatacataactgtcagattcaccaaggttgaaatgaaggaaaaaatgttaagggcagccagacagaaaggtcgggttacccacaaagggaagcccatcagactaacgggagatctctcagcagaaaccctacaaaccagaagagagtggggaccgatattcaacatccttaaagaattttcaatctagaatttcatatctagccaaactaagcttcataagtgaatgagaaataaaatcctttacagacaagcaaatgctgagagattttgttcaccaccaggcctgccttacaagagctcctgaagaaagcattaaacatggaaagaaacaactggtaccagccactgcaaaaacaggccaaatggtaaagaccatcaatgagaagaagaaactgcatcaattaatgggcaaaataaccagctaacatcataatgacaggatcagattcacacataacaatattaaccttaaatgtaaataggctaaatgccccaattaaaagacacagactcgcaaattggatatagagtcaagacccatcagtgtgctgtattcaggagacccatctcatgtgcagagacacacacaggctcaaaataaagggatggaggaagacctaccaagcaaattgaaagcaaaaaaaaaaaaaaaaaaaaaaaacaggggttgcaatcctagcctttgacaaaacagactttaacccaccaaagatcaaaagaaaaaagggcctttacataatggtaaagggatcaattcaacaagaagagctaactatcctaaatatttatgcacccaatacaggaacacccagattcataaagcaagtccttagacacctgcaaagagacttagactaccacacaataataatgggagacttttacaccccactgtcagtattagattaatgagacagaaggttaacaaggatacccaggactagaactcagctctgcacaaagcagaccttatagacatctacagaactctccaccccaacagaatatacattcttctcagcacatcacacttattctaaaattgaccacaaaattggaagtaaagcactcctcagcaaatgtaaaagaacagaaatcacaacaaactgtctctcagaccacagtgcaatcaaattagaactcaggattaagaaactcactcaaaaccacacaactacatggaaacagaacaacctgctcctgaatgactactgggtacataatgaaatgaaggcagaaataaagattttctttgaaaccaatgagaacaaagacacaacataccagaatctctgagacacatttaaagcagtgtgtagagggaaatttatagcactaaatgcccacaagaggaagcaggaaagatctaaaattgacaccctaacatcacaattaaaagaactagagaagcaagaggaaacaaattcaaaagctagcagaaagcaagaaataactaagatcagagcagaactgaaggagatagagacatgaaaaacccttcaaaagatcaattaatccaggagctggctttttgaattttgtctatcaacaaaattgttagaccgctagcaagactaataaagaagaaaatagagaagaatcaaatagacgcaataaaaaatgataaaggggatatcgccacggatcccgcagaaatacagactatcatcagagaatactataaacacctctacacagataaactagaaaatctagaagaaatggatgaattcctggacacatacaccctcccaagactaaaccaggaagaagttgaatttctgaatagatcaataacaggctctgaaattgaggcaataattaatagcctaccaaccaaaaagaatccagaaccagatggattcacaggcgaattctaccagaggtataaggaggagctggaaccattccttctgaaactgttccaatcaatagaaaaagagggaatcctccctaactcattttatgaggccaacatcatcctgataccaaagcctggcagaaacacaacaaaaagaattttagaccaatatccctgatgaacattgatgcaaaaatcctcaataaaatactggcaaactgaatccagcagcatatcaaaaagcttatccaacaagatcaagtcggcttcatccctggttgaacaaggctggttcaacatacacaaatcaataaatgtaatccatcacataaacagaaccaacaacaaaaaccacatgattatctcaatagatgcagaaaaggcctttgacaaaattcaacagccttacatgctaaaaactttcaataaactaggtattgatggaacatatctcaaaataataagagctatttatgacaaacccacagccaatttcatactaaatgggcaaaaactggaagcattccctttgaaaactggcacaagagaaggatgccctctctcaccactccagttcaacatagtgttggaagttctggccagggccatcaggcaagagaaagcaataaagggtattcaattatgaaaagaggaagtcaaattgtccctgtttgcagatgacatgattgtatgtttagaaaaccccatcgtctcagcccaaaatctccttaagctgatgaggaacttcagcgaagtctcaggatacaaaatcaatgtgcaaaaatcacaagcattcctatacaccaataacagacacacagccaaatcatgagtgaactcccattcacaattgctacaaagagaatcaaatacctaggaatccaacttacaagggatgtgaaggacctcttcaaggagaactgcaaaccactgctcaatgaaataaaagaggacacaaacaaatggaaggacattctgtactcatggataggaagaatcaatatcgtgaaaatgggcatactgcccaaggtaatttatagattcaatgccatccccatcaagctaccaatgactttcttcacagaattggaaaaaactactttaaagttcacgtggaaccaaaaaagagccctcattgccaagacaatcctaagccaaaagaacaaagctggaggcatcacactacctgacttcaaactatactacaaggctacagtaaccaaaacagcgtggtactgctaccaaaacagagatatagaccaatggaacagaacagagccctcagaaataataccacacatctacaaccatctgatctttgacaaacctgacaaaaacaagaaatggggaaaggagtccctatttaataaatggtgttaggaaaactggctagccatatgcagacagctgaaactggatcccttccttacacgttatacgaaaattaattcaagatggattaaagacttaaatgttagacctaaaaccataaaatccctggaagaaaacctatgcagtaccattcaggacataggcatgggcaaggacacttcatgactaaaacaccaaaagcaatggcaacaaaagccaaaatagacaaatgggatctaattaaactaaagaccttctgcacatcaaaagaaactaccatcagagtgaacagccaacctacagaatgggagaaaatttttgcaatccacccatctgacaaacggctaatatatacagaatctacaaagaacttaaacaaatttacaagaagaaaatcaaccccatcaaaaagtgggcaaaggatatgaacagacgcttctcaaaagaagacatttatgcagccaaaagacacatgagaaaatgctcatcatcactggtcattagaggaatgcaaatcaaaaccgcaatgagataccatttcacaccagttagaatggcaatcattaaaaagttagcaaacaacagatggtggagaggatgtggagaaataggaactcttttacactgttggcagagtgtaaattagttcaactgtggtggaagacagtgtggcgattcctcaaggatctagaactagaaataccatttgacccagcaatcccattactgagtatatacccaaagattataaatcatgctactataaagacacatgcacacgtatgtttattgtggcactattcacaatagcaaagacttggaaccaacccaaatgtccatcaatgatagactggattaagaaaatgtggcacatatataccacggaatactctgcagccataaaaaagggtgagtttatgtcctttgcagggacatagatgaagctggaaaccatcattctcagcaaactatcacaaggacagaaaaccaaacaccgcatgttctcactcataggtgggaattgaacaatgagaccacttggacacagggcgggaacatcacacaccagggcctgtctggcgctagggagctggcagggggattgcattaggagaaatacctaatgtaaatgacgagttgatgggtgcagcaaatcaacatgatacatgtatacccatgtatcaaacctgcacgttgtgcacatgtaccctagaacttaaaagtatattaataaaaaaaattaaaatacaaaaaagccgggcgtggtggtgggcgcctgtagtctcagctacttgggaggctgaggcaggagaatggcgtggcgtgaaaccgggagggagcttgcggtaagcctagatgtcgccactgcactccagcctgggtgacagagcaagactccgtctcaaagaaaaaaaaaaaaaaaaaaggaaactgagtttgttggttaagcaaattacccaaggttatatataggtagtggcagaacaggattcaaactgtgtctgacaccaaagtctgtgttttttcaacaaatcatgtcattcccgaatcccccaaaattaaatgaacgtaagtaccatctattccaaaatcttatcactctttaagagtttaatacttgagacttctagttcacaatgaatgtactaagcagttatgatacactggctatctgaaggcttttataaaagcttccattggatctgaactttccagcttgcatccctatctaccctgccagataggtataataattctcatgggttatgtagccatgagaactcaagattgaatcattctctgctaagtctcattttatatctctatacaaacaaatctcggtgtacagttcacagaaaatgccagagcttgagtgtgatggacttgcttttataaatctgcaaaagccaaccatttttaaaattattatgtatcacttaagctgctaatgctaacagatggagttttctgaaatacaaaaacagaaagcattttacttcagcattggattttgtttttctgttagtgatttctttaaaatcaactttattgaagaataacaaatacaataaaacatacttgtttttagcttataattcaataagttttcacaaattaatattccctcataactactaccataatcaagataatgaaaatttatattacccttccagaatatcctttgtactcctgccccataaatctccaacctctaactatggcaccaggcagccactgagctatattttttcactacaaattagattttccttttctaaaatttcatacaaatgaaatcgtgaatatggacttttgtatatctggctatttttcttcagcataacatttttaaggttcatcaatgttttacatgtggtgtggttcatttccttgtattgctccatattacttatttatggatatgccatattttgtttatctgatcaccagttgatgtgacattcaatttttttctagtgtgggctattaaaaatccacagtgaatttccatgtacaagtattctgtgtgaacacgtttttatgtataccaaatacttaggagtggaatttgtgaattttatggaaagtgtatgcttaactttttaagaaactgctaaactgtgttccacagtgattgtaccattttacattcccactagcaatatatgagaattagagttactctgtatcatcaccaacacttgggattattatctttttaattttagccattctagaggagaagtagtagtatctcattgtagtttaatttgtatttcctttataactatggatattgaacatcttttcatgtgtttcttggccgttcatatatcttcttttgcgatgtatttgttcaaattttttgcccattcgaaaatactaagttgcaaattctttgtttacctatgtaattcctttattagaagaatatatattttgaatagtttctctcaatccgacttggatttattttctcaacagtgtgtttcaaaagacagcagttttaaattttgatgaattacaaaatgttattttcttgtggcttttgcttgtttacccaaaatattactttcttgtggttggtgcttttttccccattctatctaagaaatctttatccactccaaagtcatgagacttttctcctgatttcttctagaagtgttatagtgtttgtgtgtgtgtgtgtgtatctcaaaatcatatataaattgacctgtaatctatttcaagttcattttgtgtgtgacaaggatcagagttcacttttttgcatatggataatacagttctttcctcatttgcttaccatggcaccagtgaaggaaatgaattggctgtgtttatgtatgggtcttctttgaactattctgttatattgatatatgcatttgatataattcattaggaaagtcatgtgcactggagttttcttttggaaggatttcaatgaccaattcagtttatttaatggatacaagtctattctgattttctgctactatttgagtcagctttgctaatttatgtttttcgtggtatttgtccacttcatctaagtcagatttactggcataaatttgtacataatattcttgtattatgtttattatatttataatacctgtatgatgtgtaataatggcccctctttcatttctgatactgataatttgtctcttctgtcatttattcttaatcagtcctactttaaatgtatttacaaatctcaggtataatgcatttgctaccctcactttctgagaagtcaattccctctcccacttttggagatgattattaaacagttggtcttttttcctcaactttccaacaccccttccaacctccttattcttggctcatgactttgcttcctttttcattaaggaaacagaatcaaaagataactttatcatcctttcactaaatttacaacctcgctgcctctataccactccccactccagttaaagtgaattagtacctcttctgtctaaagctgacccctgcacttgtgcactggattctatatactctcttctactcaaggtctctgcactggcaattgtccttcctcttgcaaaatcaaatttactcttatcagattatactcattagtgtacagacatttcatagaatcattcatatatctattttaaaacttctttagatcttacatctacctccagtcctatatcattgctcccctttacagtgaagcttcccaaaattattgtttatactcagtgtctctatacctcatgtgccattttctcctgaaaatacttttgcttaggcttccatctctaccctgccattgaaactactcttaaaaaggtcaccaataatccacactgtagttgtggtccattgtacttggtcagttattcctcacatgaatttatatctcagcaatatttgaaatagttgattactccttccttgaaacactattaatttggcttctggagcaccacaatcatgattctccctcattttcctggccttacgtagtagagtgcccaagtctcttctctgtctatatctaatccttagattatctcattcagttccatggctttatataccatctatatatacgttgatcatcctcacatttttgtgtcttgcccttacctcttcctttctgcccacttgatatctctattgtgtgttaaacttcacatgtcctaaaggaagctcttgcttccctgccctcagcaaacctgcttctcttccttctccctgtcttagtaaaaggcatcacccaattgttcagtctaaaattgaagagtcatcttgatctatctgttttcctatatccagatccagctcaccaacaagtcctgtcaattctgtcttcaaaatacatagaataaaccacttctcaaaacattcattacatctacccaagcccaagccactatcttttatttaaactattataataacctcctagattggcagtaccacagtggccagagtaatccttataaaatttaagtcagagccaggcgcagtggcttacgcctgtaatcccagcactttgggatgccgaggcgggcggatcacaaggtcaggagattgagaccatcctgggtaacacggtgaaaccccatctctactaaaactacaaaaaattagccagcgtggtggcggttgcctgtagtcccagcttcttgggaggctgaggcaggagaatggcgtgaacccgggaggcggtgcttgcagtgagccgagattgcaccactgcactccagcctgagccacagagcgagactccgtctcaaaaaaaaaaaaaaattaagtcagatcatcacacacatacacatatgcatacacacttaaaatcctccaaaggcttcccgtgtcactcagaataaaatccaaatttctaagtaaagcttacaaggttcacctaggcttgtcctgcccacttctcttatcaaaacctaacactgtgcctatgtcactcggctgaaaccacactgaccttctaggtgatttttgaatatattaagtggattcctactacaggatctttgtcttcattgttcttattatctggaattctttccccaagatctttatttgattattttatttttttagagagaggatctcactctgttgctcaggctggagtacagtggtgcaatcatggcttactacagccttgacctccccagctcaagcaatccttctgcctcagccttccaagcagctgggaccacatacatatgccacaatgtccagctaatttttaaatttttttgtagagacaaggtctccctgtgttgcctagactggtctcgaactcctgggttcatcttcccacattggactcccgaagtgctaggactacaggcgtgagccactgtgcctggcctccctaagatttttacttaaatcattacctcacttcatttggaagacttccctgaccactttattttaaatagttttacccttccctcattgttctgtccctttaccctttttttcttgatagtccttaacactgccagatattacatatgtctatgtgtatatatgtgttcatcttctgtctcttcctctagaatgcaaatgtcatgagaggaggaactttggttaatttgtgtgcccatcatatagaatagtatcctgcatgtagtaagtgcttaataaatgtgttgaataaatgaatgaaacctattaggtatagataatattactcacaatttcagatatggaaatgagtctaccacagctggcaggttttctgattcctagtccattcttttctaccttagccacttgtttctgaaaccatatctgattatttatttatcctcatctgattatttcttatctgaatttctgtggtgcttcgtgttattcccagagcatttactacattttgtcctctgctgtggctgatgcatgcccctctcttttcttactctcccccagtgccttttatgaatgctttaataatcatgagagagtggtacatcatttcctcttgaagctcacagtatttgaattttaatgttaaatttgattttcttaggttttttttttaaaaaaaaactaatgtgcaactcaggacttcagatttttcgtgaaatttttgtctagcaacctgtaactccttaaatttttataacagtagaaatttgtttagtggatttactcatatagaaaactttacttcctactttactattcttgtggctatcatttttcccccacacctcccaagaagagggcagtattgattcagggataggggacatcatgtggtacaggatggttttcattttcctgtgaaataggttacaaagtcatcagcaggcaagaggggaaagattcatttctatattcttaagaaggaagactgaaatgaggcagcaagaaatgtggactttgtagctaatgagaatctttgccttttctatgtgaacagtgagataaatcaagctagctcttcctgtagctaccacccacaaagctgtgaagaaggctgtgatagcagatggtatccatacacagtttgatttgtttagaaacctacataaagagcagcatgtgttttgttttgtttttccccttaattactcagagccagggagaccagtttttaaataaaatgtagtgatatagccaggaaaaaattataaaagaatatagacaactgtatttttaacttcatcatttcaactctataatatttattgagtatcttctcaatttattgagtaaggctctggactaggccttactttgtaggggatataaagaagagtgggtttagtattacaaaataagttcagtttaactaacgtgtgttagtgtcttttatatcccactgaagtgctgagtatacagaaattaagacagttcttttcttcaaggagcttaaactatagtgggggaaataaagttaagggatagtttcagtaccacatagcagatatgatgataaatgtctctcaaggtgctatacaagctttgaagagggtacttaatataatctgggtggataatgaggattagaaaggaaatatgtcctgggagagctaatgccctagagtacaaatctagctgagtcagtaggtgctagctatgtgaaaatgagtgggcagagatcagggcaggaggaagagcacaggcgaagactgaggcaggaaacaccatggctgtttgggagagatccagttactgctggtattactgaaagtaacatctttggcaggagatgaggctggttgattatggtggagttaagagtttatcctctaggttcatgtttcttcaggtgttggcctgttgactctctgcaacagaatatcctaggatgtttgcagaaatataagactaaactcaccccaggatgtggaaaataatctataagatctgttgtttctacttagaattgggattttcctatagggctatatagaatgttgtgcatttaatgaatatattctgaaaagatttactttgtcaggtatacagaaaaacagtggagagtttctcttaacattggtctttttgggaggttcccaagagaagaaatacagttataatgagttgtttataaaatagaggacaggtatactgtgtcttgagtcaataaagagagagaaaattccaaacgaaaagtaatttgaaagcccggttcacaactacattttttaggatatatttctctaataccaatttgaggcaagaattccttgagacctctaacacttagtgttcagcctctacccccaagcgtgtgtgtgtgtgtgtgtgtaaagtttgagagaaagcaaggaatatggatatggaagatactgcaaaatgataaagggggaaactatgatatatttataaatgttccataatcttttttactatacaggaattagaaaataaaagaagactgcaaaaacaggctgcaagtagtcaaagtgccacagaggttcgcttgaatagagctctagaagaagcagaaaagtataaactggagttaagtaaattaaggcaaaataacaaggtatggaaaaattgaatagcttttgtagtgatcccttttggtaactacttcttttatgaacatgtcaaaaataatacttaaattataattcttgatgtcatgctgaacatttctcttttcagaagaaatatattcattagcagtatacacatttctaacatgttaggatgatatgcttgtctgtcgccattattgggtgatggcacaactctttggaagattgatttcttcaaccagttttatcaggtgcccatattatatgtcagacacttttctaagctcttagaaaaagttgtttaaaaaaagtatcttttgtatctcaagtcttttattcttctctgaacctcagttttctaatagataaagtaaggctctattttacagggcagtggttctcaaacttgagcatgtatcagaatctctgggagggcttgttaaatcacattgctgggtcccatccccagaatttctgatttaataggtctggagtgaggcctgagaaattgcacttttaacaagttcccaggtaaattattgtaaggatcaccgtaactccagtgtctagccaatgcttggcatagaattagcattcggtgccttaaatatctgttgaataaatgaaagttcaaataccaatgttcatgaaacccctttgtaccttctataaatattggttactttttggttctgtattgacctgaaagggtaataagtgatattacctatttaataatttttaaattctatttaataattaaatatttaatatttaataattaaataatttaatttatttaatacttaaataatttaatttatttaattaaataatttaataattaaataatttaataataaattatttaatttaataatttattatttaataattaaaacaatatttaataattaaaacaattctgtttaataattaaactatttaataatttaaaaattttaattgtggtaagctaacacataagatttaccttcttaaacattttaagcatatagttcagtagtgtaacatagattcacactgttatacaacctatccatgaactcttttcatcttgcaaaaactgaaactctctaccaattaagccactccccatttccacctccctctagaccctggcaaccaccattgtactttctgtctctataaatttgactgctctaggaagtaaacgtcagtagaattataccatatttgtttttctttaactggcttatttcacttaacataatgttannnnnnnnnnnnnnnnnnnntatctcctttattagatcattatctgtacttctttgtatgcatttcagcatttgttatatatatgtttatcactgtatacctccaagtaatatagcattttatgaataatttaagagccttttagcagtatacttccattaccccccaccctttctgctattgtcatatgttttatctataaactctacattgttaatttaaaaattttaattgtggtaagctaacacataagatttaccttcttaaacattttaagcatatagttcagtagtgtaacatagattcacactgttatacaacctatccatgaactcttttcatcttgcaaaaactgaaactctctaccaattaagccactccccatttccacctccctctagaccctggcaaccaccattgtactttctgtctctataaatttgactgctctaggaagtaaacgtcagtagaattataccatatttgtttttctttaactggcttatttcacttaacataatgttaagtgactctcataattaaaacaatatttaataatttaatcatgacttggataatgaaattaggaaccaccttcattatatacacagataatacattttggattaagttagtaacacttaacaggaatagactgaaagtgaccttgatacatcctctaacatgtttgagaggcaaatatgtgccgtagtgattacagagttttaagatgtcgtctgtgagatagtttgttatatggtcaggtcattttcatattcaggggccatcaatgatggcataactgggatttattaatagaagttattacatgaacaagttaggaagtcatctttatagactcaccagtaattagcatgttattcgagtattatttccaatttggtgcattttacagggattttgaagaaaatgaagaataaccacctaggtatcaggatttcctaattgttgtagatttgacctctatattgtattagttcacatattaagaaaacagaaggaaaatggtttcatgaaacagatgactctccatattctagccagccattttgttttattttgttttaattttttttaggtttgtgggtacatgtgaaggttgcataggtaaacaggtgtcatgggggtttgttgcacatatatttcatcacctaggtattaggcccagtactcaatagttatctcttctgctcctctccctttttccaccttccccacttcaagtagaccccaatgtctgtttccttctttgtgttctgtaagttcttatcatttagctcccacttataagtgaaaacaagcggtattcggttttgtgttcctacattagtttgctaaggataactgcctctagctccatccatgttcccacaaaaaacatgatctcgttcttttttatggctacatagtattccatggtgtatacgtaccaaattttctttatccattctgtcattgatgggcatttagttgattccatgtccttgctattgtgactagtgctgcagtgaacatttgtgtgcatgtgtctttatggtagaatgatttatattcctctgggtataataccaataatgagattgctgggtccaatggtagttctgcttttacctctttgaggagtcaccgtactgctttgcacaatggttgaactaatttacactcccaccaagtgtataagtgttcccttttctctgcaacctcaccagatctgttattttttgactttttagtaatagccattctgactggtgtgaggtggtatttaattgtggttttgatgtgcatttctctgatgatcagtgatattgagcttttttttcatacttgttggccacatgtatgacttcttttgagacgtgtctgttcttgttctttccccaccttttaatggggttgttcttctcttgtaaatttgtttaagttccttatagaagctggatatcagacctttatcagatgcatagtttgcaaaaattttctcccattctgtaggtggtctttttactctgccgatcatttatttttctgtgcagaagctctttagtttaagtagatcccacttgtcagtttttgcttttgttgcagttgctttttctgtctttgtcgtgaaatctttgcccgttcctatgtccaaaatggtattgcctaggttgtcttccagggtttttatagttttgggttttccatttaagtttttagttcatcttgagttggtctttgtataaggtggaaggaaagggtccagcttcagtcttctgcaaatggctagccagttatcccagcaccatttattgaagagggagccctttcccattgcttttgtcaggtttgaagatcagacggttgtagatgtgcggccttatttatgggccctctactctgttccattggtctatgtgcctgtttttgtaacagtacctgtttttgtaccatgtgctgttttggttattgtagacttgtagtatagtttgaagtcacacagtgtgcctccaactttgttctttttgcttagtattgccttggctattcaggctcttttgtggttccatgtgaatttttaaatagttttttctaattctgtgaagaatgtcactggtagtttgataggaatagcattgaatctgtaaatcgctttgggcagtataggcattttaataagtgttcctatcagtgagcatgggatgttttttcccgttgtgttttctctgatttctttgagcagtgtttcgtaattctcattgtagagatcttgcacctccctggttagctgtattcctaggtattctttttgtggcaagtggggatgggattgcttttctgatttggctcttggtttggctgttgttagtatataggaatgctagtaatttttgtacattgattttgtatcctgcaactttgctgaagttgtttatctgccaaaaggagcttttgggacaagactatggggtcttctagatatagaattacgccgtctgcaaacagatagtttgacttcctatttggatgccctctctttatttctcttgcctgattcctctggttaggacttccaatactatgttgaatagtgttgagagagggcatccttgtcatgtgacagttttcaagggaatgcttccagcttttgtccattcagtataatgttggctgtgggtttgccatagatggctcttattattttgaggtctgttcctccaatatctatgttatttagagtttttaacataaagggtgttgaattttattgaaagcctgttctgcatctattgaggtaatcgtggtttttgtcttaattctgtttatgtgataaattgcatttattgatttatacatgttgaaccaaccctgtatcccaggaatgaagtctacttgatcatggtagataagctttttgatttgctcctggatttggtttgcaaatattttgttgaggatttttgtatcagtgttcatcaaggatattggcctgaagttttcttttttggttgtctgtctgccaggttttggtatcaagatgatgctggccccatagaatgagttggggaggagtccctcctcagttttttggaatagtttctgtaagaatggtaccagcttttctttgtacatctggtagaatttggctgtgaatccactgggtcccaggctttttttgattggtaggctatttattactgattcagttttggagctcattattggtctgtgtagggattcagtttcttcctggttcagtcctgggagggtgtacatgtccaggaatttgtccatctcttctaggttttctagtttgtgtgcatagaggtgttcatagtagtttctgatggttgtttttatttctgtggggtcagtagtaacattccctttgtcatttctaattgtgtttatttgaatcttcactcttctttactagtctacctagtggcctattttattaattttttcaaaaaaccagctcctggattcatttatcttttgactggtttttcatgtcttgatttccttcagttcagctctgatttttgttatttctcatcttctgctagctttggggttgatttcttcttgcttcttgaattctttcagttgtgaagttacgttgttaatttgagatctttataactttttgatgtgggcgtttagtgctatgaatttccctcttaactctcccttagctgtgttctagagattctggtatgttatatctttgttgttattttcaacttttttatttctgacataatttcattatttaccccaaagtcattgaggagcgtgttgtttaatttccatgtaactgcatggttttgagtgattttcatagtcttgactccagtttattgtgctgtggtccaagagtgtgtttggtatgatttcgttcttttacatttgttgaggattgttttttgtccaattatgtggtcagttttagagtatgtgccatatggcactaagaagaatgtatattgtgttgtttttgggtgcagagttctgtaaaggtatcatatccatttggtccagtgctgagtttaggttccagatatctttgttaattttctacctcgatgatctgtctaatactatggagagttgaagtctcccactattattgtgtgagagtctatgtctctttgtaggtttctaagaacttgccttatgaatctgggtgcttctgtgttgtgtgcatgtatatttaggctaattaggtcttactgaattcaacactttaccattctgtaatgcctttctttgtcttttttgatctttgttggtttgaaacgttttgtctgaaattagaattgcaacccctgcttttttctgttttctatttcctggtagattttcctctatccctttattttgagcctatgagagtcattaaatgtcagatgggtcttctgaagacagcataccatttgagtcttgcttttttatccagcttgtcactccatgccttttaagtggggcatttagactgtttatattcaaggttagtattaatatgtgtggatttgatcgtgctgttgtgctgttagctggttattaggttgacttgtttgtgtaattgctttacagtgacattgatctgtgtggttaaatgtgtttttgtcttagctggtagtggtctttgctttctatgtttaatgcttctttcaagagctttggtaaggcaggtctggtggtaaagagttccttcaacattcacttatctgaagaggatcttatttctccttcacttaggtagcttagtttggcttaatatgaaattcttgagggctttttttttttctttaagaatattgaaaaattagctgggcgtggtggtgggcgcctgtagtcccagctacttgggaggctgaggcaggagaatggcatgaacctgggaagtggagcttgcagtgagccaagattgcaccactgcactccagcctgggtgacagagcgagactctgtctcaaaaaaaaccaaaaaacaaaaaaacagatgtgatccttgtagctgtgcacctatcttataatgaaattgaatgtttagataatccatgaagcaacacctagataattatcgaatttagataatctatcaaagctaaggtgcaactgcaataaatgctgtggaaagtatatggtgctttgagcaagtaaccaagccaataaatgccttttttaaaaacatccaatgagcatttattataacacaactggctactatagttcttttgcatttccatgtaagtttttagaatcacatttggagttttgataggcattgtgttgaatctatagatcagttttgggaaaattgacatcttaatagcgtctttaaagtcatgaatagagaaaatctgtttatttaagccttcttcaatttttccaagcagcttttatatatatatagtttccagaatacaggttttacacacttttttttcaaacttatctcttagtgtttccgttttttgatgttataaatgttctttaaattccagtttcccattgtttgttgctataatggagaaatacaatttatgtttgcatattgagtctatatcctcaactttgctgaactcacttattctagaagccttaggattttctacagaccttttctgtaaaggaccaactagtaaatgctttggctttgtgggctacatatggtcccttgtgtattcttcactggttttcttttttaaaatttatttaacaccttcaaaataaatcatttttagttcacaagttttagaaaaactgactgcagtttcctgagagatcttaccaggaatggatgttgaattttgtcaaatgctttttcccgtatctattgaaattatatttttctttttttagtctttcaaatgttaaaacaaccttgtattcctgggatatattgcacttggtgatggtgtgtcattatctcttttatatattattggttacttttttgtgaatgtctgtatacatgggaacatagtgctagtctgtttagtctgtagtcttgatttagttttcttatacattattttcatctttaggttttttggtttgaatttgttttggttttggtttcagggtaatgctgcctttattaaatgaacttccaaatcattcttctggagaagctcaactttcagataagtttttgtagggttggtattattttttctttgaatgtctggtagagtccacaggtaaagccgtctgggcctgaggttttcttgtggaaagattttatacttcaaattcaatttctttaatagatacagaagtattccttatagaggctatattttattgtgttttgggtgcttacatctgtcaaggaatctgttcatttcgtttatgttgtcaaatttactggcatacagttttttacactagttccttattgtcctctgaatattcctcctacattcctgtgggtcattcccccctctcattcttgtattggtaatttgtgtcttttttactttttctgatcagtcttactagaggtttactaattctggttttattgattttcctctactgattttttattttttttattgatttctgctcttctatttctttccctctccttacttttgggttcaatttgttctttttctcttttctcttttttttttctcccctagacagagtcttgctctgttgcccagggtggagtgcagtggcgcaaacttggctcactgcaacctccgcctcccaggttcaagcggttctcctgcctcagcctcctgagtagctgggattacaggcccccgccaccatgctcggctaatttttgtatttttagtagagatggggtttcaccatgttggccagactggtctcgaactactgacctcgtgatctgcccgctttgacctcctaaagtgctgggattaaacagatgtgagccatcacgcctggcctctttttctaatttttaaaatggaagtggagactgttgatttgtacgctttcttctttgctaatataagcatttaaacactgtaaatgtttctctatgaatttccttagctacttcccaccaaatttgattttttgtattttcatttttattctattcagaatactttctaattttcttttttatttcctctgagccatgacaaactttacgagtttgtcatttcatttttcaaatacttagggattttccccagataccattcttactgatttttaattccattgtggacagagaatgcatttggttttatttgaatcactctaaatttatggatacttttttttggcccagaatatggtttaaattgggaaatatttcatgtgcccttgataggaatgtgcattctgtatttgttaggtggagtattctataaatgtcaattatgtcaaattgcttgatagtgttgttcaatacttctgtatcttatgtattttctgtgtccctgttctatcaatgatcaagagaggggtactaaactctgaatagaactgtgagtttgtctattttccctttcagtcttaacaatttttgcatcatgtattttgagacttggttattagctatattaatacccagtatctaagaagattgttaaatcctcttgaatgaattgacctcttattatttatttatatttatttttgttgctgcattctgatacaggttgagtatcccttatcagaaatgcttgggaccagaagtgttttagaaatgctacagtggacatttcatctttgagaatcatgtcagcactcaaaaagttttagattttagagcattttggatttcagacttttggattagggatactcaacctgtattacctttgtttgatattcatgcaactcaagctttattttagttcgtgttagcattgtcttgtctttttccattcttttatttgtaactcctttgtgtcttctcattagcagcatctagttgactttgctttttaaaaaaatccagtctccagagtgtgatgttccccttcctgtgtccatgtgttctcattattcaattcccacctatgagtgagaatatgcggtgtttggttttttgttcttgcgatagtttgctgagaatgatgatttccaatttcatccatgtccctacaaaggacatgaactcatcattttttatggctgcatagtattccgtggtgtatatgtaccacattttcttaattcagtctatcattgttggacatttgggttggttccaactctttgctattgtgagtagagccgcaataaacatacgtgtgcatgtgtctttatagcagcatgatttatagtcccttgggtatatacccagtaatgggatggctgggtcaaatggtatttctagttctagatccctgaggaatcgccacactgacttccacaatggttgaactagtttacagtcccaccaacagtgtaaaagtgttgtggggaggggggaggggggagggatagcattaggagatatacctaatgctaaatgacgagttaatgggtgcagcacaccagcatagcacatgtatacatatgtaactaacctgcacattgtgcacatgtaccctaaaacttaaagtataattaaaaaaataataaaataaaaaaataaaaaaatccaatctgacagtctctttttaattgaggtgcttacaccattatatttaaaatgattaataatatggttgggattaactctattagctagctgttgttttagttggcccgtatgttttctttcccttctttttgaattgcttttttaaagattccattttatctcctttattagatcattatctgtacttctttgtatgcatttcagcatttgttatatatatgtttatcactgtatacctccaagtaatatagcattttatgaataatttaagagccttttagcagtatacttccattaccccccaccctttctgctattgtcatatgttttatctataaactctacattgttaatttaaaaatttttaattgtggtaagctacacataagatttaccttcttaaacattttaagcatatagttcagtagtgtaacatagattcacactgttatacaacctatccatgaactcttttcatcttgcaaaaactgaaactctctaccaattaagccactccccatttccacctccctctagaccctggcaaccaccattgtactttctgtctctataaatttgactgctctaggaagtaaacgtcagtagaattataccatatttgtttttctttaactggcttatttcacttaacataatgttctcaaggttgatcaaagttgtagcatgtgtcagaatttcattcctttttaaggcttaataatcattgtatttacataccacattttgtttattcatccatcagtggacagttgagttgcttcccaaccttttggctagtatgagttgcactgctttgaacaagggtatacagatatcaatgtctcctagagaaaagtgaaatgctagttccttgatgtgtaaagtcaggttgatttgaaatcttctttcctaatgtaagcatttacaactacaaatttccctcttagcagtgcttatactctgtcctataagttttggtgtattgtagctttgttgtcatttgcctcatgatattttccaatttgctttgtgatttcttctttgaccccttggtagtttgagtgttttgttcaatccccacatatttgtggattttccagttttccgtccgctgttgatttctagtttgaatcaactgtgattggaaaatatactttgtatgacttataaaatgtggggaatgttccatgtgcacttgagaaaactgtattctcttatttttttcgttaacatcttattgagatacaattcatataccatgcaacccacttaaaatatacaaataagtttgtttttagtagtcacaaagttgtgcaaccatcaccacaatcaattttgcaattttatcaccccaaaaagaacgtctgtacccattcacagccactctatattcccccaacaccctgcaccacattctagccctaggcaaccactaatctacttcctgtctctccatatttgtctgttctggtatatgattatattttttctttattatttcaatcgttttgggggaacaggtggtgttggttacacagataagtgctttagtggtgatttctgagattttggtgcacccatcacccgagcagtctatactgaacccaatgtgtagtcttttatccctctcacccttcccccacaaatccctagagtccattatatccttcttatgcctttgtgttagaggactactctttatgtctcttaaatctaattggtctataatgttgttcaagtcccttattgctttattggtcttccatccggtgattctattgattattggaagtggggtattgaagtctacttttactatagagtagtcttttctccaagtctgtcaatgcttgcttcatatatttaggcactttaatgtttggtacatatataattgtatctatcttcttgctgaactggcccttttgtttggcccatatgttcttatataatgtccttcttggtatgttttaacagttttgacttaaagtctattttgtcagatattactgtagtcactcctgtgttcttttggttacaaaatttcagattatctttttccatctttttaccttaaacctatgcatatctctggatctaaagttagttgcatgtagacagcatatagttggattttggtttttaaaaatccattcttccattcaatttattttggttagggagttttgtccatttacatttaaagtttttgggaggtctgttgctgtttgttcacaattttatgtatgtcttgaggacttttaccctctcatttccttccttattgccttattgtttagttgattttgtgtaatgatgcaacttcaatcgtatataaagactctactccttttcagcccctgccctaccttgtgttattggtgtcacaaattacatctttaggttatgtacccattaacaaagatttatagtattttttatgcttttgtcttttaaattcgaaaagaatgaaaagtgaaagaatgaaaagtgagttgtcaaccaaaattaaaataatacaggcctttatatttgtccaaatatttacatttactggggaatttcatatttgcatatagctttgaattattgtctagtatccttttgtttcaacttgaaggattttctttaggattttgtagggaaaatacagtggtaatgaagttcctcagctcttatctaggaatgtcttaatttctttttcatttttgaaggacactttgctggatgtagtattcttctaggtttttttctttcagccctttaaatatatcatcctactgacttctggcctgtaaagtttctgctgaaaaatctgctgataatcttacagatgctcccttgcatgtgatgagccattttgtcttgttgctgtcaagattttctctttgtctgacactcgactgattaaaatgtgtcttgctgtgggtctctgggtttatcctacttggagttcatggagctttttgtatttgtgtatccatttctttccttaaatttggcaatttttcagctattcttcaaataagttacttgtctccttttctatctaagattacactgatatacatattggcccacttgatggtctcccttagctgctgttcacttttcttcattcttttacttttggctcctctgacctgctcatttcaaatgacctgtctgaaagctcactcattctttcttatacctgtacagctctgctgttgaacccttcaagtgaatttttccattcagttactgtatttttcagctttagaatttgtttggttcttttttgtaatttttgttgatagtctcattttattaatatataggtaccctgatttcatttagttgtcaatattctccttcagctcatggagcatatttatggcagttattttaaagtccttgtcaaataagtgagaagcctttgtttctttaggatacacttctggatattaattttgttcctttaatatggtccatgtttccctgtttctttgaatgtcttgtgatcttacattgaaaaacgggtgtttgaaaaaacagccacttctcccagtcttgcagactggctgcatgcaagcaaagaccttcactaatcagcatggtgtaaagtcttgaggtcctctcaaacctttctggggttgtgtctttcctgggcctgtgtgttttaattccagttttccatacacacggcttcttttaaatgtcctaattacctaaaaatctcactacttcttctcagagatttagatgctgtattttattcctctgcccataattttttgccaccaggttcctgcagttctgtggactcactacacctctcacattcagtggtaccaaccacctgtttccgcagcttccaacctgatatccaaatgatgcagctgttcccatcagtactgagtcaggcaagacagatagcagtccctcaggcaggccccagaaaagccagaatgttgcaagcaagtctactcttttccctccattccaagggaagaactgggaattgggtggcttcttcctgactgtgctgtgccagggaggatgtgggtaaagggtgagcaaaacaccatgacatttcctactgctttgaatatggcctttttttagttaggcagtattttggttgctggttctgactgactcattggtttttagagctctcccaaaagtattttggtttgtgtatcaaatagtcagtcttttaatggggaagcaaaggcctggagcttctttatcccccattttgcttacaacactcttattttttaaaaaggtgttttttttttttttttttgaaaaggtgtatatatatatatatatatatatatatatatatatatacacacacacaaacacacacacacacacgtatgtatacataagattacacattactatttcttttttctccatcttttttatgtgtgtgtacagagattcacatttccttctggtatcattttccttttgtatgaatgacttcctttaatctttcaagtatagatcttcctaaacgtaatgatttctactgaccctttttctgctttgcccaaattgctaaagagcttatccagtccatttttaccaagattacaaacttggtctcccgcttgtcatgggaagtgggtaaattctctgcttagctaaaggccacagccatttcctttcacaggtacctaggagtctcaccctctaaatggtatttagatgtctgccaagcatttgagggaaatacgtatgcatgttttgagggctctgtttttctagaattttgtaccaccttggcagccctgctctctgactcctcagtccaataagactactactttttgcttgagttcttacctctgtgaacccacaaactggaaagtgcttttagaagaagctagttgaatgtggatctcaaccagtatttctgctctttcaaggatcatatcgcttccagtttctacttattattgattactcatctacaccttcaaatatactttttaaacgtttttaaaatatgttttcaaatatattatttttgaaaattcataaatccagagtttatgttggttcaatacaagctactttgccattactggaattagaactgagttattttaaaaacattttttaaaaatgggaaatacctgagcatgactaaaagctatcaaattccagtaattcggtaatggaaagcaatttttatctacaaaaattttatatttcagtttaagaaagtactttttattactgttgtgatgatagtctataattctttccattgaggctgtatattaaaaatatatggcacttttttttccttgtgtaggacatagcaaatgaagaacacaaaaaaattgaagtgttaaaatcagaaaacaagaagctagaaaaacaaaaaggagaattaatgatagggttcaagaaacagttaaaattaattgatgttttaaaaaggcaaaaggtgagtctatcattaaagttaaatcatcatattatttgtaactttcttactaaaaaatttagcatttttcactttaggtatgtttttgacatctttacgcactgaacttcatataaaatgcatcatacatatgaaatcatatgaaatctaacatttatagtgagatatatgtgtcatctaagcaagtggatattttcacataagtaagttagtgtagaaaatgggactggaaaatacagtataggtacttctcaactacagaaagtaccaaattaaagaatgactattaggggactgtttgcctcttcaaaccttagagcgaacatcacttccaaaccactattgctgctttctctaaaaattcatagttctgacactttccttctttgcaaaggtcaggtatttaaaatattatagaattattattatcttaaaagtaagttggttcagtactactgttggacaataccatttcaaatatcatgcttattggaattaagagtatacattcctacaacagaacttatattctgacaatatattatccacacatttttacaaacttcctgttgtttggtggcctactcttaatactaaatcagacaatattgattttttttttaacagatgcatattgaagctgccaagatgctatctttcactgaggaggaatttatgaaagcacttgaatggggaaattcataagtgatctacttcagttagtctctatgacagtatgtgatggatacccattttacttattgtagtggtttgaattatttttattcttcataagtaatatatttgattatgaaagcaaaataatttcaaagaattccctttttagatttaggagattagctattagctctttttgagttgttttttaagttcttagcgtgacaattaagcacatcagataataaaattcttgactcttttcatttataattctcctcccttacagtagaccaaaaaagatgctttaaaagaaaattccaaatatttatttccctggctaaatcaagtaagtaaagttcgtaaacacagacagaaggcagttcactttggggtagagttctgtattagtcaaggtaaatatactgtcttgaggatggggatgcaaacagtgctctgtagtgttgtagaaatcggattttgaaattatcagtacaaaaataacagcttgattaaaattaatttgtatctgataattgtttacaagttatgaaattcagtgatgatttacaaaatccaaacagacaatggatacctaatgccactgaactgtaaaacaaaagttatgctgacatctagtggtaacatgcaaaaaatctatgctttacccaattttgatgatatcatttctcttcacaaatttcactcctttgttgatatactttcctgaactcttcaccaagcagatcaatatcatcctcttttttaaatactccctacgagaaaaatactttgtgggttacttttgaataccagaatatttcactaaatgcttttaagactgacagacataagattagtaaagttatctccaaggtaatgaaatctattcaacagattaatgaaactttaaaaaaatcaatacttttcaaaaaataagactttacatatatattgaatattcctagactgacccaattttctgatttatcagctctagtgtaggagcttttcataggaatctgagctcttctacaagttctactgcttggattacctagataggaaggcacttcatctatactgtaccctacccttttctttaaatagctctataatatgatataatggtgagcttcagtagattcatgcatgggattagttcttcatgcctcagttctatggctaatcagcaaacagtcaatcttgcagaaaagaatccaggtttggagttaagccatttaagcaaaccctttggaattcttcactgttctatttttcttttcccctacagtatactgcaaaaggctctttaaaacaaaattaaatatttacttaaattgcaatctaaagaataaagaattttagggataactgaagtcatttggcaccattaggacctaaaggataaaggtcatttttggatatcaagtttattaatccctcctgctgcctccacaattatttcctctacaaaaatatcaaatcccaaagaaagacattcctacaatttataatttagtttatgaaatgtattaattacatatggattttatcattaatacatcattttgtattccttaatcctttctaaccaattagactatcaagtcctgtggccaggcagtaattacctatatatctttttccttccttagcaccagagtgaatataataaaataaatatgcacttgattctactgaataaaatatgaaatggcatttctatagctgaaagatggcgatcttatttatatgagtctagatgtttatgtggcctatgaaactgttattacttttttaagacaagacggggtctcactctgttgcccaggctggagtgcagtggcaagatcatgggtcactgcagcttcaactttccaggctcaagcaatcttccaacctcagcctccagagtatctgggactacaggcgtgcatcaccacatccagttaactttttattttttgtagcaatggcatctccccatgtttcccaggctggtcttgaactcctgggctcaggtgatcctcctgcctcagcctcccaaagtgctgggattataggcatgagttgccatgcccagccagttactattttatttgaagtcacagtgtgtctcaggtatacattaaaattcactatcttctggaattttaaaaatcaagtttaactagttataacttcctactgtagagcagatctgtctcaagctcagttcaaccatgtgcctattactggtgttaccagtgacaatgttttcatacacattctcatctttggcatgtaagtactacagttctagggtagtctcaagctcagttcaaccatgtgcctattactggtgttaccagtgacaatgttttcatacacattctcatctttggcatgtaagtactacagttgttctagggtagctttagatttcctacactaaaaggggagaaaagaaactctaaaatacaaactcaggccaggtgtggtggcccacccagcacttggggaggctgaggcagatggatcacctgaggccaagagttcaagaccagcctggccaacatagcaaaatcctgtccttaccaaaaatacaaaaattagctgggtgtggtggcaaacgcctgtaatcccagctactcaggaggctgaagcaggagaatcaccgggaggcagaggttgcagtaagctgacatcttgccactgcactccagcctgggcgataaataaggtacaaattcagtaaatcaagctcatacatctaataatgtgctaagaccaatcattttagatatactgaaatgggcccagagaggttcagtgcctggacaggaggatcccattgctgcttcataaccgagcaagaagtgagcaaaaccaaggcactctaaaatccaaataccatgtttttttcactattacaggtcatgaagattacaacttgagataaatctcacttactttagggagatagcctagtaagtttgtagcatgctctttaagaagttttagcctttcttcttcaataattgcattaataaatccttgccgcctttgctgcaactgccactcttctagttcacgttgctggaaatgcagatcaaattttgttatcacaaagtacattaatcttatacgaagttttcaaataaaactactcatgcaatgaattagataaaattgatgaactatttatgacactaagttcaaaagattctagataatatatatttttaaaatatatattttatgtctgtacacatatctatgtattttttactgtcattattcctttaaaattacaaggaggcaaacaaatattttcaggaaagtgtcttcattaccaagggaaaaaatattcaaaggagtgactgcctaatacagtaaatatttactgaatgcttaccatataccagatgctgaagagtttacagtgtaaaacaaaaaatagtgaataaagaagatcagaaatatctaaaggatattttcatatatatatatataaagatgatatgaagcatgagaattccactagtatttcttaggaaagtgctcactcttaaataatcacatcaaaattctgggccatatagaaaagatgacttgaactacgtgaaagaacagtaatctactaagccactgttaatttgagactgtacttgcattcaaacctaattctatcttaattcatccattccttataaagaggagatacaggaaagttctgtaatgttacaggggaaagcaaacttgatacatttttgtccaatggtagagtctactttgggctaatgcagattttcctaagaaggatctggcaggccacattcaatgtttatcctaaaaagaaaaatttatagtaaattaaattgtttaggcagttacgaaatcaacttatccatttaggacaaattctgaatagctttggtgtaggaaactacctcctgggaagtttcagattttgtctgaccgtatgattttcgtagaggtagacagaattacagatacctatttaggaatgtctctgaaatccaaaaaacatggttagaccttataggattgtataatgagtttcatcacgaagatctgtccttgacttggggccagaacaaaaatgttgcccaatcaaacggacaaaactaagccgacagcttcatattgggaacatttataagtctttaaaaattaagacaaaaattatttgtataagtatctatgcattaggtggctttatctgatttccatttagtttttagtctgatttctagttagttgtcttgctaacttttccaggagctttctcctatccaagtactaaccaggcctgatcctgcttagcttctgagaacagatgagctccaatctgaaatataacagcacttgtattcccatgagtttctcatatttgaaacatctgcattattttgactcctactttgtatagttttaaaagaagtcatgtaagtctcacttagtcttcctctaaattcttctcttcctaccgattttcaaaacacctacatattatccatttggttcttaaaccacaaaatctagtgagacaatataagtatttagttttacggatgagacataaataagtcaatgtatccaaagccaaaaacttcattccctctccaacacttaaatctacatttccaactagtaatcttcccctgggccaccaaatcattttgggtggacaaaatagaattatttgcaccctcaaaatctatttcttttcctctatactctttccttaggatgtcacccagtcacccattaaagatggaagtgacacatggacacagggagaggaacatcatcacacaccagggcctgtcggggggtgggggggacaaggggaagggagagcattaggacaaatacctaatgcatgcagggcttaaaacctagatgacgggttgataggtgcagcaaaccaccatggcacatgtatacctgtgtaacaaacctgcatgttctgcacatgcatcctggaacttaaaataaaaatattaaaaaaataattaaaaagatggaatgacagtattatttattaggggtagccttaagtcttctctcaccctagatctcactggtcaccaagccccatcaattccgtatccttaacatctctcgggtggatcccttatctatttgcatgggtttcaccacttgtcactgggattattataataacttacttactgatctccctatctccgagcttactcatctcttatctaccttcaatgctctcacttgaatcgtctttcaaagtacagatcttaatatacagcttttcaatcttcagtggcttcccttagaaaagcccaccttcttaaaatagcatgcagggtgttcatgatctgtttctctctctgccataccaaaacatccatagctctataacctattatcacatgtacatgacatatttataattactttttatatatttttcttaaccaagaccataaattcataagtgacatggacttagttttatttaccttttatgttctcaataccaaccagtgtttagcacatagaaagcatcaataaatattttctagaagcaaaaatggtcagaaaatttatatatatattagtaaacatactaacattgtctggcatataaagcttctcagtaaatgtttagtggatgatagatgagctattgctgtttaatgataatgaccaaaaaaaccccacaactttttcttactttgtctgcaaggaattgttggcgacgctcttcaataagtttttccacagccctcctgtgttccagctgcttcattctttgtttctgagcattcattaattctattcgatcatcctcagcaaatttagctagcatagtttttctaaagttctcctcttcctcttttgcagcctgtagcactaattccttcaaggccatttgttcttcaaaatcttgcttcatctctttttgctttctcaatttcttttctgcttcttcctaaacaatacagctgaaagttaatttagtaactatttccttacaccagatttataaggaaagagtgatagagtttggttaaatttagtattacaatatgaaatcatacaaactgaaaaagtaaggcttttcatgataactttgtccatccctttaaaactagctggataaagaatatgcttacatttggattgttttctgttactcatgaacaaattttaatttatatttaccatcttgtttctctactcagaattaacacgtaactgctttgaaaagagctgttacaaaagccttttttgcacacctgagtttattcatctaaagtctatggtaactatgaatcattctagaatcttgcttacaaaagctgtccaaaccacccataagtatttttcagtttccaacctcctcctcaaaatcaaagctgcacttacccatctctagtcttctaatattcccttcattctccaaaattctctaaaatttaaaaacaattatctagcaatgacaatcagtacttctttagggaaattcaaatatagttggaacagttaagtcctttcctataagcttttattttctgaacattttattatgaaaaatttcatacatactaaaaaatataattttacaatggtcactcacttctaaataattcatgggccaaagagggaatgccaaggaaaataaatacattgtagttaataaaagtgagacagcaaaatttgtgagatgctgctaaagcagttctgagaaacatttatagcactaaatggatacatttaggaaaatgtatatatatagcactaaatgcatgtatgtaggaaaagtctcaaatcgataatctaagcccccacttcaagaacctataaaaagaactgtaaagtaaacccaaaatatgcagaaggaaaaacataataaaactgtagaaatcaatggaattaaaaatagaaaatagacaattattggtgaaacaaaaggctggttcttaaaaattatcagtgaaatggacagacctttaacaaggctgacctagaaaaaaaaaatgaatgaataaacaaataactaatatcaggaataaaacataggatatcactagagaccctacagacatcaaaaggataatacaggaatactacaaattattatacacacataaatttggcaacttagatgaaatggatcacttccttgagaaacacaagctaccaaaactcaccaaatatgaaataaggtaatctgaatagtcctatcactattaaggagacggaattaataacttaaaattcctccaaaataaaaccccaagtcaggatggtttcactagaaaattctatcaaatatttaaaaaattaacacgaattctacacaatctcttccagaaaacagaagaggaggaaacatatccccattcattttatgaagatagtattaccccgctaccaatataaaaaattacagaccaatattcctcgtgaatatggatgcacaaatccttaacccaatattagaaaaatagatcatacattaaaagaattattcaccatgaccaagtagtgtttattacagggatgcaagactggttcaatactcaaaaatcaatgtaatatacttggctaaagaagaaaaagtcataatcatatcagtagaaaaaagtgtttaaccaaggatatccaggaattgaactcagttctgcaccaagcagacctaatagacatctacagaactctccagcccaaatcaacagaatatacattcttctcagcaccacaccgcacttattccaaagttgaccacatagttggaagtaaagcactcctcagcaaatgtaaaagaacagaaattataacaaactgtctctcagaccacagtgcaatcaaactagaactcaggattaagaaactcactcaaaaccgctcagctacatggaaagtgaacaacctgctcctgaatgactactggatgcataacgaaatgaaggcagaaataaagatgttctttgaaaccaatgagaacaaagacacaacataccagaatctctgggacacatttaaagcagtgtgtagagggaaatttatagcactaaatgcccacaagaaaaatcaggaaagatctaaaattgacaccctaacatcacaattaaaagaactagagaaccaagagcaaacacattcaaaagctagcagaaggcaagaaataactaagatcagagcagaactgaaggagatagagacacaaaaaacccttcaaaaaatcagtgaatccaggagctggttttctgagaagatcaacaaaattgatagaccgctagcaagactcataacaaagaaaagagagaagaatcaaatagacgcaataaaaaatgataaaggggatatcaccacagatccaacggaaatactaccatcagagaatactataaacacctctacgcaaataaactagaaaatctagaagaaatggataaattcctggacacatacaccctcccaagactaagctgggaagaagttgaatccctgaatagaccaataacaggctctgaaattgaggcaataattaatagcctaccaaccaaaaaaagtccaggaccagatggattcacagccgaattctaccagaggtacaaggaggagctggtatcattccttctgaaactattccaatcaatagaaaaagagggaatcctccctaactcattttatgaggccagcagcatcctgatactttggtcgtctgtcatcctgacagagacaccacaaaaaaaagagaatttaagaccaatatccctgatgaacattgatgcaaaactccgcaataaaatactggcaaaccaaatccagcagcacatcaaaaagcttatccaccatgatcaagtgggcttcatccctggaaggcaaggctatttcaacatacacaaatcaataaatgtaatccagcatataaacagaaccaatgacaaaaaacacatgattatctcaatagatgcaaaaaaggcccttgacaaaattcaacagcccttcttgctaaaaactctcaataaattaggtgttgatgggacatatctcaaaataataagagctatttatgacaaacccacagccaatatcatactgaatgggcaaaaactggaagcattccctttgaaaactggcacaagacagggatgccctctctcaccactcctattcaacatagtgttggaagttctggccagggcagtcaggcaggagaaagaaagaaagggtattcaattaggaaaagaggaagtcaaattgtccttgtttgcagatgacatgattgtatatttagaaaaccccattgtctcagccccaaatctccttaagctgataagcaacttcagcaaagtctcaggatacaaaatcaatgtacaaaaatcacaagcattcttatacaccaataacagacagacagagagccaaatcatgagtgaactcgattcacaattgcttcaaagagaataaaatacctaggaatccaacttacaagggatgtgaaggacctcttcaaggagaactgcaaaccactgctcaacgaaataaaagacgacacaaacaaatggaagaacattccatgctcatggataggaagaatcaatatcgtgaaaatggccatactgcccaaggtaatttacagattcaatgccatccacatcaagctaccaatgactttcttcacagaattggaaaaaactactttaaaattcatatggaaccaaaaaaggggccacattgccaagacaatcctaagccaaaagaacaaagctggaggcatcatgctacctgaattcaaactatactacaaggctacagtaaccaaaacagcatggtactgctaccaaaacagagatatagaccaatggaacagaacagagccctcagaaatagtaccacacatctacaaccatctgctctttttttttgttacaaaaaagacaggtttgttacaaacctgacaaaaacaagcaatagggaaaggagtccctgtttaataaatggtgctggaaaaactggctagccataggtagaaagctgaaactggatcccttccttacaccttatacaaaaattaattcaggatggattaaagacttacatgttagacctaaaaccataaaaaccctagaagaaaacctaggcaataccattcaggacataggcatgggcaaggacttcatgtctaaaacaccaaaagcaatggcaacaaaagccaaaattgacaaatgggatctaattaaactaaagagcttccgcacagcaaaagaaactaccatcagagtgaacagccaacctacagaatgggagaaaatttttgcaatctacccatctgaccaaggggtaatatccagaatctaaaaagaactcaaatttacaagaaaaaatcaaacaaccccatcaaaaagtgggcgaaggatatgaatagacacttctc

SEQ ID NO: 827 - DNA, 1583 bp, Homo sapiens
tcggtaaccgcgtcgcagtcgccgaagatggcggggcgaagtctgtgtctcacggtcagttcaactccaggctcctggggagcgtctgggttccggcgactaggacgcctaacttcctttaacttcgggtctgaaagtctgtggctcttttacagagaagcagcgttccagggactccgttcccgccacccgttcagcaaccctctacacctggacccgacctcctcgccttggaggaagaatataagcgtttaaatgcagaattgcaggcaaaaacagctgacgtggttcaacaagctaaggaaataataagagatcggcaagaagtacgatctaggcctgtttcaacacaaatgaaatcatgtgatgacgaagatgattacagtttaagtgttaaattgaaatactctgatgtccaaactgccgacgatgttgccattccagaggatttctcagacttttcccttgcaaaaacaattagcaaaattgaagggcaactggaggaagaaggcttacctgaatatatagatgatattttttctggtgttagtaatgacattggaacagaagcacagatcagatttctaaaggccaaactccatgttatgcaggaggaattggataatgttgtatgtgaatgcaataaaaaggaggatgaaattcagaatttaaagtctcaagtaaaaaattttgaagaagattttatgagacagcagcgaacaattaatatgcaacagtctcaagtagaaaaatacaaaactcttttcgaagaagcaaacaaaaagtatgatggattacagcaacagttgtcttcagtagaaagggaattagaaaataaaagaagactgcaaaaacaggctgcaagtagtcaaagtgccacagaggttcgcttgaatagagctctagaagaagcagaaaagtataaactggagttaagtaaattaaggcaaaataacaaggacatagcaaatgaagaacacaaaaaaattgaagtgttaaaatcagaaaacaagaagctagaaaaacaaaaaggagaattaatgatagggttcaagaaacagttaaaattaattgatgttttaaaaaggcaaaagatgcatattgaagctgccaagatgctatctttcactgaggaggaatttatgaaagcacttgaatggggaaattcataagtgatctacttcagttagtctctatgacagtatgtgatggatacccattttacttattgtagtggtttgaattatttttattcttcataagtaatatatttgattatgaaagcaaaataatttcaaagaattccctttttagatttaggagattagctattagctctttttgagttgttttttaagttcttagcgtgacaattaagcacatcagataataaaattcttgactcttttcatttataattctcctcccttacagtagaccaaaaaagatgctttaaaagaaaattccaaatatttatttccctggctaaatcaagtaagtaaagttcgtaaacacagacagaaggcagttcactttggggtagagttctgtattagtcaaggtaaatatactgtcttgaggat

SEQ ID NO: 828 - protein, 343 aa, Homo sapiens
KSVLQRSSVPGTPFPPPVQQPSTPGPDLLALEEEYKRLNAELQAKTADVVQQAKEIIRDRQEVRSRPVSTQMKSCDDEDDYSLSVKLKYSDVQTADDVAIPEDFSDFSLAKTISKIEGQLEEEGLPEYIDDIFSGVSNDIGTEAQIRFLKAKLHVMQEELDNVVCECNKKEDEIQNLKSQVKNFEEDFMRQQRTINMQQSQVEKYKTLFEEANKKYDGLQQQLSSVERELENKRRLQKQAASSQSATEVRLNRALEEAEKYKLELSKLRQNNKDIANEEHKKIEVLKSENKKLEKQKGELMIGFKKQLKLIDVLKRQKMHIEAAKMLSFTEEEFMKALEWGNS

SEQ ID NO: 829 - DNA, 36119 bp, Mus musculus
  misc_feature (1)...(36119): n = A,T,C or G
acttcggtgatatctgcactttggtctgccgtgggttccctatctggggtgagtagacaggtgtgtggcagctccccaggaaaagttttgtcacacagcagcagtgaactaaggtagatctatgtgaccaggtattttgcatatcagccctgccacagatcaacagataggctggaaggaacccagtgtggtccaacacagccaggtggttatgacagtgactaactttcaaaggtgggatggagccaacctgattcagagagcaacaagggcaccaggcaggggccaggtctgagtggaaggaaggaaacaaaggcagtggcctcctccagaagccagagagagcaatcgagaggccctaaggcacaacagcatggcaaccaaaccaggggacaatctagacttcgggtcctgggctaaaggtgcacagggctggggctggctttcctcaccaagagtggactttgttgaggggttcccagcgacccagctctgaggacgtagaactggcagaagctggaaagcccacatgaccccccctcctcttctgactttcttgtccctgacactattaaaggaatttctgggaaactgagtcaccaaactgttttcatttagagagaggagctccctacttttattaaaaataaataaataaataaaatctgctagtattcagatttgtaagctcttaatcatgtcaatggtctcccgtgtgaattgtagagactggtcaccccaggggcttgcagttagcattccaaaacataattgccctcataaactgagggctgattctgctggttttagaatttcttttcttnnnnnnnnnnnnnnnnnnnnnnnnnnnnnnnnnnnnnnnnnnnnnnnnnnnnnnnnnnnnnnnnnnnttcttcttcttcttcttcttcttcttcttcttcttcttcttcttcttcttcttcttctcttccttctccttctcctcctcctcctccttcttcccccccccctctcccctctctcccttctctttctttttagacaggagctcactctgtagccctagctagcctggaattcactgtgcagagtgggctggccttgaacttgtagaggctgggacatctgcctctattttccgggtgctggggttgaagctctgaggtgggctgctctcattttcttggagagaatgaaagcactatgccaatgaggagttgattgttttactctctgtaccaaaaaacaaaaacaaaacaaaacaaaacaaaacaacaaaaacatcattttttttcttcttcttaactgtcttgataagacactcattttcttttcttagacaatttctcatcatggcttcccactgtgcttccagctccctctgccttccacgatcacttctcatgggacctgtactaattttccgggactgtcatggcgtattgtataaaccaagcatcttaaatgagagaacttactgcttcactgttctataggccagaagtccagagcctaggtgtctgtaggagccatgatagcatggaaggcccctggggaagatccttcatcacctctcccgacttctggtggccccaggcatcccttggctgtggctgcatcagtataatctctacctccatctctagctggccttctcttctgtgtcatgcttctgtgtgtgtccctcctaaggatattattatcagagtcaggacccgtcatagtagcccagggtggcctcatctttggatacctgctgtcacaacaaattctgtttatccaaataagaccacactcctaagcatcagatcccggggtggggtccatcccttttacccctcaggatcgcacttgccatcctttgtagagagtgactgtgggtccaacctaaccacggtggagtacatatctggcagttggttacatctgaggtgttcgtgctagtcacgtggctgagacagtttagactcccaagttctaaaacaaatctttgtggggcttctaatgaccgccaacaggaagagcttggaagctgtcccctctgcaaagcacattgaggtcagagtcgcagctcactgtctgttcccatgtctgtataaagagcacagagccaagggccactgagtcactcaccacgtctctcacgtagactagggtgacgatgccttttctaccgtaggaaaagaggtgaggggtggcgtcttggtccgaacacacctaaagctctgttctgtgtgaatgggagaatattctagaggaaaactcaagagctagtgttggagcttcggggataggctctggaacttacactggcgatggtgacaccttcccaaagagcaatgtcaccgaacgctgtgaccaggagtgttaaaaacacaatataaaggatgggagtgatgagttggctcagtgggtaaaagcacttatcatcatgtgtgaccgcctgagtttaatccctggaacccacatggtggaagaagagaaatgactcccacaaactgtcctctgacctccatgtgtatgccatgatgcactctaaagcatgtccgtgtgtgtgcacgcgcgcacacacacacacacacacattaagttaatgtaaaattaattgattcatcaaagtagtatgaaaacgagaattctgtcaccagttagcaaagtatcatcacgtctatactcttaacccatgcattcacatgtcgaggatacacaaagacctttgggagcttttcagaattagatgaggtcatcaaagtgggaccacgaggaatgagaggcttgtgggagagagctgcatgatgcatcctgcctctctcagtttgtggcacctctgttacagaaagaatacagtcacatatgcccagatgccataaaggcttatgctaaacatctgatatgaaaccgtctgaggaaaaaaagggtcaaatgggagaaagccagaggactcaggggagggtaacaggatacaggggaagatgcttgcagtcatgatgtccttgaatagaaatggccttagcagccacacataacacatttaaagaaaatccaaaacaacccctcccccctccaaagcaggaagaagacctcaccagatgtcagcaccatgctcccaacctctccagctatgggcttaattaataaaagtctatcctttattaattactctgtctccagcacctcgctgtagcaacagcacacagactgactgatgttacatagtgtgtgtatgtgtgtgtttaaccaatggaactttaatatataccagtgcttgctaaccaacatgtttacatttgaaaggtgacaaagagccatgctgagaattaattggggagattcattccaaagatatttattaaatgctgtgttggaaatttttccagcgctgcagaaaggtaataccaaaccagacacaattctggccctaatggaatgagatctatgctggaaagacaaagaattaattaacatgataaaataatcaattagctaattaattaattaattaattaattatcaattaattgaaagaaaggactaggaaatgttgttgaggaacacctgcctgacaagggcaaggtcccatctcccgcatgacaaaacaaacagtcgggactataaagagtattaaacagcgtcaggggtttagataaaaataaatgaattcacaagatgtagtcaattaagttgaaagagtgtcactgagcagcctgggacaatcaccaggtggcttctcagtttagctaggttggatttgagagagaaggcaggtaaggacagggggtggagtcttgggagagaaaggctcaaggaagcctcctgcctggcagttggggggtggggggtggggtggatgggggaggagggaggttgtactgaagccagaacaacagcctgaagtgggagaaggcctctgggaggagatgagccaaatggcctcatggagagccaggtctcatggtgtctcccagaactctggcttttcctctgagttacttagctgaggaagggctggctggctgatctaacacagtccctctgttagaagtctcgagaagaatgagtagaagaatttaaattcacaagttccattgaaaagtcattttctaaatgtcagatgcctgcttccccccccccgcccccccccccaagtacagcaagcaggtggttcttggcagggaagcagtgcactccttctgacacagacactgaagggtgggatggagatgaagacttgggaggcacactcgctaagtttagtcagtcttcacacttgctaccgagaagcacatatgctccggctcagcaccgggagagggtttcctttgtctcttcccacaccgagcccagctattttggggtggccaagtgtctggaagaggctctgctactcctgattctgccaggaaggatggggcttacaggctgaagcaagggctggatgggttatctatcagcatggccttgcctcctcctccccaactgaggctggttcaagaaacagacatggagctatatatgatgtccttaccgtggtgttaaacaccctacacaattcagccatcactcagaccagcaacttcccatgtacctgcaaacagaaatgggataattgaccacaaaaaaatggagagagactgtgaaggagacagtgagactgtctttgcagcagagaccacacactgcacgcgcgcacacacacacacacacacacacacacacacacaccccggggggggggggcagtgactgctggcttcctgtaccatggatggcgcccttcctagggctgtgttgaattcccagaacaaaatgggaattgttcaaaatctgtgattttcaagatggcaataaaaggcgaatgaaagtaaatgctggcatcccaaaggatgttcacctgctgggagacttgaggtaacaccagcattctgtgagactcttcctgaagaaaaggcctgctgatcttccccactgaaagctcagacaggacgctggccttcctcctagttgaaaggcagcagtgggatagagagatggatcaggggctaagagcactttctgctcttctagagaacctaagttcggctccccgcacccacatcaggcagctcatgaccccccaagggatccaacattgtcttctggtctcactggacacacaaatacacacagataaaaatggttgtttttgcaactggagcaaagcacgtggagtggaaactctactgctgtagaaaccggggtctgtagctccgctactctggaacagacatgatcttagaatatgtcccaggacgaggggagtctccactcctcagaggcagcacaaaaccctgaagcctctgctttaatcttaaacttccaggtcccagagctgggagacctgagttctcactgtttgtaaaccattctctgggtccagttctccacaaccacagcaaacaactgaactacccccttccacatcagtttatgccaatatatactcatatatatatatatatatatatatatatatatatacacacacatatatatgtatatgtgtatatatatgtacatatctacacatacacacgcacacacacacacacacacacacacacacacacacacacacacatatatgtgtgtgtgtgtgtgtgtgtgtgtgtgtatactgtggctgactttgaacacaccagaagagggcatcagatcccattacagatgactgtgagccaccatgtagttgctgggaattgaactcaggacctctggaagagtggtcagtgctcttaatcgctgagccatctctccagcccattgcacctggctttcaagccttggaaccaaactatcccactgccataatgatttcctccacgcctactgaagcctgttacattatcctttaggtctttaatccagatcgcaccttaatccaggttttgtcttgactctggaggtatgtcaaagactgaattttgctggaaggtctgactggatcgtgaacaactcttagtttatttgtggttcagcgatcctggtggctcagagctaatgtaggagtcatgtttgattcagaaggggagaaaaaaaaaaccctacaaatcatatatctgtacaggtctgactcagcacagacacatttatttagagattatcaattttacaaataccatgggtccttattacgaatttagctgttcagacatgcctaaggcacaccaccctgcaggttaataccacggtggattttcaaaacagttgatgcacttcaagaatggagccgtagccttataagggaagcagctgtgtagggtgatggcggagtggacagcatagcactgagaccaggggtgtggcccagtcctgcaagaaaactgcccaatgtccctgagcagggagccaagcctccttcagcctcagtttccttctctgtaagtatgagtattggccttatttactgcttctgcagagttttcaagcttcgaaattcagatttaactccaggcttctcttaactaccaaagccaagaaaatcaaagaaaccaagacttctcttgacagcaatggtcttggcattcctggttgtgaggcctgggccttcagccatgaagggtgagcctgaaaggcagagaccaagtctacctaggcagagaaatggctgatgatactccctattttcatttcattgtgtgaccacctttgttctgtgggctggacctcagaccagagacctacagacacttgccccaggggccacagctggataaccagcagaaggctgagctagggtgatcccaggcaatgtgacccaacagctgcccttagaggtttggagagcaggttccacgcaaggagtctgtctgtcttcatgcctagggccctgagagacacaagaggcctcaggccagcagaaaacatgctagagggacagtgggaaaagatttttcccaaggattgtccatcttgacattagggaagacctaaggccttgacaggcattgggatcccttggtgggacctggagagacttccagctcccacgtcacacagattcccaggacccgtgcaggccgacagactggcgagagaggattggtttggaaaggcgtggggttagaaagtctgccattatctgttccttgaccccaacaccagtgggatttgtgaatcagttaactactccatgacgcattccaggccatactcaaaatggggtaattctacctccccacacactccaggcccttacttgcctctgctttcccaccctctgggttcaaagggctccactctgtgtgtgatccccacaatccaacctcaaggggcaggcactcaagccccacttccttttgtcctctccacctcacaccgtgtttgcagagtgaatattgtacacctcagactaaatgtttaacttggagctgggaccccgccctcccaccccccaagatagagcctttgagccagatcacaaggtaaacacagccagctcttcagcaggctgggatgcacggtttctgaaaaggatgacttaatgggttaatcattgtttcataattatgcccaggtcctaaagaactctgcatttcactctctaggtaattcatatgctctttcatattgtctccccttctgttcagaggagggttggttacatttgtcctcatgctgctcccaccccccaccccctacagtccacctgctcgctccttaccagctccttaccagctccaagccaacgagccttccccagcctccatttcctcctaacgccattgacttttgatctcagagcagaaggagtgcgcttttattagattcaatttgcagaaaggccccagcttccctgtgaatcgagccataatagtcaatgaataatcacagggctcagccaggctaggctttaactccggctcagtaactaggaaaccacccaagaagaggaaggggtgggggaaccaaacagaaaaggtaaatgtgtatctgttatgttcctgagtatgtaactgatcaaggctgaggtgggccaaccacaaagcagaggcctgtctagcttatgcttgggatccaggttgcctcctccagaaggccaggcagaacacaaaggtgcctgacgtctgtgagagctcgctggtctgccatgcgtgcttctagccgctgttgttttacattaggtttccacatactcagacctgacaggtttggggtggctttcctgaatacctttcttcctcttcatgtatatgacagttttttcccccagagattttcctaaaatgctcctaaaagagagtttagaaaaacttattcaggaatttagagcccgtccctaccaagttctcagccctgctgataaattcttttacaggtttgcttcatcagctaatcaaagtttaatgacaggggtgctgtgacacttgggtactaacttcttttgtagcttttctgctcagcattaccaagagctgccctccagccatcagcctgagcagccctgagaggcttggctcaataaggcctttgtggaccaaaggagtcctcgaatgcccacggtctcaggagcagaagtgatggaaggaaacagtcctgttttgggtatctgaacttcaagagatcactgtgtgtaccaagcttctcagatacgtggtcaaggcgtgaaaatacttgcagggagatagggccaacggacacactccttcagacaagtcagtaccttctgctatgttttttttttttttaagttagcatatgctgttccgtgtctccatggtaacgggacagggactctttcttctatttatggagttcctccttgacctgggttctctggtctggacctgaatacacactgagaagccatgaggaaatatcaattccctctggacctagctgttttagcttagtggattaggccttgactcctgcaaaggtgatacactggagagaagtatcaggtgtaatagtatcttgattggcaataatttcagatggggagttgccatggaaaccaggaaccctgcggtaccagagaagctggggtcttccactcccttcccggcaaggctgtccttgtaatgtaccaatcgtcagtcccgtggccttgcctgagcttgccatttgcaatttcatatgccatctctggtaacaacctaaacttgagaaggaacgaaataatattcaacgtacacctgtgcctacggatgaatcccacaggtttccaaccatggactcaacgccttctgaccaaaaaggaaaccactctttggcttgtgttttgaccatgagtttgggagagtcacgctggacttgacatgtagttgacctcgtagaccatgttaagtagaacacagtagtagccttgaaggatttactaagactaataatagatggcgcctaagtgctcggccaagtcggcgctgagactcggctcagccctagggggcgccatccgcaccgaggcagtaggaggggcctctccagaggcaagcggctgcgccacgttctgctcttccactcgcgactccgccacccgcccactttgcgactccctaaccccacgtatgagtctttcacgacgaaggaccagaaatcaggacccacacgtagctccaagcacagggcaggctccaccgcagaagcctaaccacccaacccaagtgccaacagggcccccagctcggacctgcagacagcctaacgcgggcggatacggccctgcctttctagctggacctcctgggcataacgcccgaaccgggctccaggagcaggggccagcaggcaggcgacagcgagctgcagggtcgcagagaagggcccgggagcagcgtggatccgccgctgccagagcgcgctctcctcccacgccggcctcgcgctcgctcctcctccgcgctctctccgtcacccctgctgtcccctcccccggttccctccggccctcccccagctccagaagagcgcgcggctaggagatcgggctggttacttccttcaccgcggcgttgagcacagagtggacaccactgaggcccgtcagtccccgccaccttccccggccccgcgcgcccggatcggccctacggcctcgtctcgcccggccttgcgcgccgggaccgccgcgatctcctctccccgccgccctccggctggccctgcctgctgcggcgcggtaagagcggcccctgtgcgcgatggtcctcagcagagactccgcccggggtggggtgtagtgcgggcggcccctgatcccgccgggccatcgcgcgccccagagccgctccggctggttcctaggcacccagtggcctcggagggggacccaggcatcgggcagggcgcgggcagaccgcttttgttttggggaagccagtggtcgccccgtgcggttcctgcccggggtgcgcgactgcgtttctcgagagggcttgaggcacctggagaggtggccgaggtagccccaggttcggggtgacttgagttggggaggcgctaggcctggaaggatgtgggggtgtccggatcatggaacacctgggaagttgcggctcccgggaacgtgtcacctgcttggccaggtctgggctcccctgggccctgggaagccagtacgggatacggtccaagtaggggtgctggtggctgctctgcttttattttctccttaaagcatatgaatgaaggggtaacctgaagcgtttgcgtatttgacttttttttttttctaatttactatttaatctcataagacttgtactagcctgcactcaatttcaggggagcctaaaatagtagttgactcgctacttatttagaaagtaaagcggtgagcagtcctggttggagagaggagtcatttaattcgccagttgagagacttgctcccgctgtggaagctcctgtcggtatctgcctgcctacaccaccgccaatccggagatacatctcagtgttaagcttttattaaaatctgagtaatctcgcagtgcagttaatgtgaacaccgtgcatcccacagggaaatagccaaactctcatatatggaattagtcattcatttctctaaactgattgctaagcaaaaggcaaaccaaccttcaaagggttttgtccttttattttatttttttaacctaaatttatctaaatacaaactcatgctctcttatataagtgattacctgttccactaaggatacagttatccatgaaattcttgtttaaaaacctaactattcccagttactacatttctgccattttctcccatttcttgttactatttttttttttttttttagcccatcaccagtaccaaaaagtctaaacttgaaattgatttatctagagtcttgacttgtcccaggggttagcaagcacatccagtcggataaatgaacttaaatttgattagccgtgggtctgcctgaagccatttagtggagggctttaattctacattcttttttttttttttttttttttacaaaactcattaaaagccaggcaacaaaggaaccctgttctgcagccggtaattacagcatttatgtgggagtgggagcctcccttttctgctcctgtttgtacacaaaaggcaggggagctcttccccaacctctgaagctattctctgcccatctcagaagcgaaaaatcacagagaagtcctcgagtgtctgtacactggggcaacagaaagcactgtccgacaggccctggaggaaccacgtggacacctctgcctctgctgctggttttctgcgggaggcttgtgtttagtcaacaggttacaggctacagggctgactccatccaagtaggcgacatgaagttctcagttggcgagtgtttcacaggactgaagtgtgacagaaaggcctggtttgctcatatttgtgtgctctctgcttcagtggggtggggtagggagagcccactcaggcatggtcaggatttaaggccctactgatctgaggcgtaatctccacagacacccccaaaggagtgtgtagtctaggccggtgactcagttgtcaccggtcctcagttgcctcagaataaagtgattttacatttggaacctggactctcaggaggattgtgaggaagtgggacttgagtcttcacattgggagctaggcatgctgtcctggtggtcttcgtctgtgaggaatattgaacccacagtaggtatagctgggataatataccaagggagaacctgaagaaatgtccccgctctggagactgcacagtccctgctgtgacatcaccaggatggtggctccttcaaggcccctcagcttttctgggctgctttaaccctgatctgcatgtctgggctcccagcagccttcccttaaggcctctttctgctctgtggccttttatcaaggtgtgagtgtgtgcacgtgtacactcacacatgtcggtgtgtgcatgcgagtatgcattcactaggaaattgttaagccatctgtcattggcccacaatgttgactataaaaagaacacaagacagagggatcaaagcaagttaaataattctttgagactatgctatctgctgcctctagtgagttctatcagttgcctgctaattttagtgactgtgtgtggttagcaggtgggtgcccatgaaggagagcaagggggtggtggtggtggctgggggttggacactctacacaatggagctatcgaaggctcccgttctgtagcttggagcctggaggacggagagctgccgtccagtgatggtgatctctggtgtgtggaaatgaggctccgtgactgggtctgtctaacgctctctgatattgttgaagggccttctttcatttagcatgtcatattagggctccagaaaattttttcagaccactgcaggtcacattttggtttttggtttttttgttttccttcaacatgctcaaaatagtcttaacagatcaaatcgattttactatattcagtcaacctaatgtattcacagcgttatataagcacaaagtaaatatccaaaggactgagacatctttctcctactggctcttgagatctatgtgtatcttctctcagagcctgtctcccttcacagtagccatgttcattgccagtagccacaggtggccagctggtggctgcttggttggtcagcccagctctggtatataagccccattattaaagcaaggtctagcttcacgaagaaatgcaaaactgtggtacccaccaaggagagatgttctcagatcacataatcagagcccaggatctgggacagtgtgaggggttggaggttcagggccatgcttctgtatagctcagagaagagtgggtttgtgtgtgtgtatgctggtctgactcccatgggagcttccaaggcagggacccctctgtggcttctactagggccaggctaaattgactgccctgtgtagacaggagatggtggctttgtggcccttcttggcaccacctgaggtctcacctcagtttaccatgagtagcacagcctcctcgctcagctacgccagggttcagggaagcctgtggagtctcacatcgaaagtggaactcagtgggacccctccccagatcttgttctccttgagagctgcttggcctggatcccttttaaataagaattcctgtatccgagtgtgtggacgttggccaccggcagtgttctgtctggctaaagattgaagccaaggacgggcgtggtggtgcacgcctttaatcccagcacttgggaggcagaggcaggcagatttctgagtttgaggccagcctggtctacagagtgagtttcaggacagccagggctacacagagaaaccctgtcttgaaaaaacaaacaaacaaacaaacaaacgactgagccaccatcaaaactgtacttcaatggtaacctctgactctgtctcactttttttcctaagatgaatgactttggaatcaagaacatggaccaagtggcccctgtcgccaacagttttcgtgggacactcaaggtatgtgcttcttatctaaattatcttgacggttttagaaactacaataatcaagagaaagcccccatgaaagctatcatggttttagatatcttagctatgtggctctgatgaaattgtttcctctctttgagcctcagttttctgtgctgttaaatgggtatcttgatgttatttgtacctgtcccccaaaatatagaagtagttcatttgcagatgagttcatcctgaagttcctttcaaatgggaaaaaaccaagtcccatgattcttaaagaaaacagctggaaagacagatcatggctgatcaagagggctgtttctgaacttccttgcctttgtttatttgtgtctgtgcatatgcgccatgatgtacacacagaggcaggaggatagtttgtgggagtcagttctccctttactttcaccgtggaggtcctgggatttgaactcaggtcaccgggcctggccttgggtgtcttcactagtcagcaccatcattcctggaaggctgtttaacttacatgaagaagttgaagaataggcatcttgtgctactttcatcaggaggggctgcacccaccaggttagagggagccttctctgtctgctgcagcagctcaaggctgtttatgcaaaccccaaacagactaaagacagagctggctcccctgttgtggccgtgacatgttgtcatccttttggaacactcttgtagcataaactggtcatttccttgtgtaagggtgtgtgtgtgtgtgtgtgtnnnnnnnnnnnnnnnnnnnnataagtgtctttcgatatttcgttccactttatttttgagaccacatctctcactgaacctgtggcttacaagctagtcttgtctaggattcctgtatctacgttcctagtgctaggcttactaaactacagcacagtctctagtgttggctcttgcctaaccttttatttgagggagggtctcttgctctctgctggctggccccaagtttctgggggttctcctgtctgcctcccttcccagcacactggcgtcacaggccaggggtcccctgtgcagccttgcatgggtcctaatgcatgtactcatgcgtgcctagccagctcttttcccaccccaccttcccccactcccccagctccctaaaccgtctttaaggttatgtgtctggtgtaaactacagaggcagaacctggcacccgcttttctgtttgatttagtcatgtgccttgagtggggcagaaatggtaaatggtataaggagttagtgttatggagaagctacacacacccctaaggaaaaaaagccctctgtaaactgaaagagcttgctgacgtctggtgctgacgtctggtttcggagaagacgttggttgtcagagtctgtgtggaaaaatgtgtagcaagggtttgcactgttctttaacttcctggttttaaagaaagaacttccagagagacactttctagaggcctaagcagtgcgtgggggagggttttgtttttgttttgtttgtttgttgttaacatctatttaatatttcacccaaaatacctgcataaaaatcctaggtagagtacttcacgtttctcagtgggcctgtcctcccaggtagttggcagtcccggggggttgaggatttggggttggggcgggcagcctgtctgccctcttgtgcaacaacaggtctgtcactcgctcttctgcgtttctggaatgaaggcccggtgtcgggctgacttatctgtaaatgtgttacacattttattcgcccgtgactcaacacacgggtcattgtgttacacacgaagtaggatttccagattatgttgggaaatagagcttttctttgcgcttcctaaacaaaccaggctggggtggaccagccttgcccggtgcgtattcacgctcctcccattcagggctgctgttttgcaaacatggagtctgtgagctcattcagcaggccacactttccagggcttggtgtgtgtatccaattcttcctaaagattcctctgaaagccttcctgtggttgaagtttctcttctgcaatcttttttttttttttttccagagctgaggaccgaacccagggccttacgcttgctaggcaagtgctctaccactgagccaaatccccaacccctttttgcttgggtttttttttttttccctgcaatgttttttattttttattatcatggaaaatattaaggctgtttttcacagattactattgtctgaactactgtgtgtgacgaggaggaattccctccctcccttaaagtggtagatacttcaaaggagctttttattttattcaaagataaaaatagcttgttattgttttgatttcccgtttcttcccagccttcgctttttatttgaattgnnnnnnnnnnnnnnnnnnnnattttttcttttcctacacaccccaatctgacgaaagaggtcttggtcttctctgaagacctctccagtgtggccctatgatcctgctgtttttagatgtatttcatttattaagttgattgtgctgataagataatcttccaggccatcaggccctatgaggttaattaaagagtgtggagtgagatagaattgtttggattactttgaggtcattggcctatgttaccttagaatggctgatgtcatcaggacccatggcagggttacttggaccactaagaaagcacgccgtcaagtgagttcacgtggcatttctttttcttttccgcagcgccagccagcctttgacaccttcgatggctctctgtttgctgtgctcccttctctcagtgaagatcagacactccaagaagtgcccacgggcctggattctgtctcccatggtaatttgtcctccaccctgacagatgcatggcttccctcggcatcgggttaataaagacatgatcagttaatagagatagaccattctggttaataaagacatgatcagttaatagagatagaccattctctagccaagaatatcaatatcttgagtattgggtatgagaagtctgatagaagcctggggtctgggagaagacagttttcttcttctgtgagcgaactggtcattctggtgtcgtcacaggcagttcccacctgtgagccgagaactgtctgtcactcacagctcggagctctgagagtcatactttgttgttttcaaacactccttcatctccctggtgtctttttcaaatagaaggtagtgggcatggaagggtgccccagcttacatgcatgtgcacatgcacccacacgtggacacacacacatacatggacatgcgcagacatggacacatgcacacacacacgtggacatgcacacgcccatgcacacacatggacacacatgtgcacacatgtggacacacacacacacacacacttttccctttgagtcttggaaccacaaattactcttgctccccttaaccctttatagttcagtaattctcactgccattctttcaaaggcctagcatgtcacatatgtctctacagctacttcagagagtaattggctggacacattccagatcgacttgtcatatatctgaagtgggtgctcaaactcacagcccacagagatcaattaaaggtcccgtgctttcataagtttggtgttgtctggcagtcacttatcgttcccgaaatttctgagagcatcagaaaagattcctttccaaaaaagttgtgggtgtgcctgttttaccatgatgtgttgtctgtgcctgacatgcccaccttcctttgccagtctgcttagtttactggacacagcttccatcaaacacggtcactgaaggcagccagggacgatagccttttgatattgcaacctgacattgtcatctacagaggccatgcttgataaccatgccgtcaagttacaaaaagtaaaacctcttgctttgaatacgtctgacagttttgtgttgggctatgttcagctgtgcacaggctgcaggctgcaaggttggacgcttctgaagcgttttaaacaaaaactgtaaaattttaaaattttcaatacattttgggtagaaatggtgtctgtacatctctgctttatgaagctttgccaaacatttaatttttgttttaaaagttcacacacacacacacacacacacacacacacacgaggacttagccgacttggaactcactgtgtagcccaggttacctatcattattctcctgtctgccaaatgctgggattacagctgtgtaccacaaaactcatttttattctggattttcctttccataattggagtaattctaagaagcacagttggtttttattcctaatgtctttgcttacttttctaaaagaaaaaaaaaaagcatgtcaaattatacctctgtgaatactgtagtctactttttaaaaatctttccttgtttgcttttggagtttcttttttggtagtagtgggtacagatccccctgcatgctaggtggcactgcttggcaccccagccttgcagctggaatcatgtcaagatctgtgatcggggctctctgcagactggggcttattctgagcttctgtcaacattgccacctgagtcctgacatccctgtcgtctctctctagactcggccagctgcgagctgcctttgctcactccctgcagcaaggcagtgatgagccaagccttaaaagccaccttcagtggcttccaaaaggagcaacgacgtcttggcatccccaaaagtaagtgctaagctttgaggctggtgagtccccggaagacgcacgtggtgggcctgtctttgaaatgctcctggttatcttgcaaggaatgtagctgccctgagtgtggcctgctgcgcacctaaccccacactcattaaacaccaagtgccatttggtatcttagaacatgcctgtgtcacagcaggctcgtgtcttgttcatgtcctgatttggcgctgcctgggcttggtgaattgttgagggccacatgccctcccggtcttccagatgttcactggtggtgtcctttcttgctctccctgcacagacccctggctgtggagcgagcagcaggtgtgccagtggcttctctgggccaccaacgagttcagcctggtgaatgtgaacctgcaccagtttggcatgaacggccagatgctgtgtaacctcggcaaggagcgcttcctggagctggcgcctgactttgtgggtgacatcctctgggaacatctagagcagatgatcaaaggtaaggtacaggattgggaggcagggacccagggagccagaaggtgtggccttccttctacctcaggctgcccagtggtagagtccattgcctcagaacacccccaagcaagtcaaacggggaggtgatgacgggtcttcattccacggagtgaagcgtgtgcagtgttcgtggagtgccaggtgtagccacaaggcaatagcctgagtcaccaaattgctgactgttgccagactgtactggttgtaccagctcagagcaccttggatatgtaggccagccagggtggcaggtgggtgaactcactaggaggactgagagagacggggttgcctgactgtacggcacccacccggatcactgtcgatttggtaggaagtgactccaggccactgaggattttggagaatggattgtaaccaatgatttatagatacaataaaatgttaacagcagacacaagactcaaatctcaaccaggctagagacctctcttgtcaccagccttaaagatcagtgagacctgcttaaaagatacctgggtttaaatgaaggacagcgacaggaagactaacaagttaaaacaacaaaaaaagttttagcactttcaacttattttttttttatactaaagttttgtgtatatttatatatcccttaaaaatcatagagctcaataaataacctaatgatacaacttaagggtttttttaaattaagtattttcttcagtacatttccaatgctatcccaaaagtcccccataccctccaccccactcccctacccacccactcccacttcttggccctggcagtcccctgtactgaggcatataaagttttcaagaccaatgggcctctctttccagtgatggccgactaggccatcttctgatacatatgcagctggagacacgatctctggggggtactggttagttcatagtgttgttccacctatagggttgcagatccagttagctccttgggtgctgtctctagctcctccactgggggccctgtgatccatccaatagctgactgtgagcatccacttatgtgtttgctaggccccagcatagtctcacaagagacagctatatcagggtcctttcagcaaaatcttgctagtgtatgcaatggtgtcagtgtttggaggctaattatgggatggatccccaggtatggcagtttctagatggtccatccttttgtctcagctccagactttgtctctgtaactccttccatgggtgttttgttcccaattctaagaaggggcaaagtttccacactttggtcttcgttcttcttgagtttcatgtgttttgcaaattgtatcttgtatcttgggtattctaagtttctgggctaaaatccacttatcagtgagtacatatcacactttcaacttataaactcagaatttcatttggggttctgtagccaggctggcttagttatgcttcctagagccaaaaacaaaacaaaacaaaaaacaaaaacaaaaacaaaaacaaaaaacccaactttaaaggctccctgattccctggggagcctggactggttttacctgatgcatttctgggaagccatttgtgtggcaagtctggactcctgggcttttgttcagcgtgtgtgtttgtgttgcttggcttcaaggaatgatatatgtgattgtgatatgtgtgatttccctgtggacctcagggcatcccagaccaacctgtggaggatgtgaagcctcacagagggcaggaaccaagtcctttttctctcacccactgctttcccagccccaggacagatggctcttcataaacacacaaaccgggctgttctgggcagtgacatcactgattttgggaaacttaccccagattattaggaaaataatcttgtcattttaaacataaagaggagtaagctgaaatggaatgtgaagcgctggcggtgaggcgagtcgtcccggtgtccacatgacaggaagttgaaatatggctctccttgtagagttttcaaactgtcttctgtgtctccttttcagagaaccaagaaaagacagaagaccaatatgaggaaaactctcacctcaacgcggttcctcattggatcaacagcaatacattaggttagtcgagtgattgtgccttaagatctctggttttgttctctccagctcctcagatagcctagacttatactcttcctactgtggctacacgcagcattgatccactatgcagctgaaatgtgtaatgagaatctaagattttgactaactcagcggtcttaaaatgaaaccaagaatatacactattccttgatgagttaggatactctttgtatattgaggtgaccactgctatgctgggtcagttgttccttgagttttttaatgtggctcctggaaaacttagcattgcttaagtggcttctatataggaggcaacacttgctctagaccattttaaccataaagaggaagaagaagtcagtagacactaatgtgatatgacagaagaggtggccagaacaaacgtgtagaaaactcactgtgccctggactcttggcaccaggatacctgtcccagaacggggtcctctgtgtgtgggtctagctattggaacactgactgagtctgccatctgatgtctgattcatcctttcgttcaggcttcagcatggaacaggctccatatggaatgcaggcaccaaactaccccaaagacaatctcctggacagcatgtgcccgccatcggccacgcctgcagctctgggctctgagctccagatgttgcccaagtctcggctcaacaccgtcaatgtcaattactgttccatcagccaggacttccccagcagcaacgtgaatttgctcaacaacaattctggtaagagaacgttctagaataaggctattattggattgtcctggaagccagtcaggatgagagatgcttggtaagcacaccctgtcgttcagccgttggagaaggaggttaaaggactgggccaccttccaagcgactttccaaagagccgactcacaacctctttgatattgagtgagcaacattgaatagctagaggactttaagctaactttcctgtggtagagtacactgtggagacacattgggagtatgctaggttcctttttaaggatgtagcatacatggtccacacatctgagattgtacacctggttgaattaatggggctgtgcgttcctttcttagctgccatccactcggaggcagagtttctagccatccgtaaggtttcttcccagccctctttacaagagcgacccattagcctttgcgtcattacggattggctttcgccgccgtcctgagacgtcacacgtgggctttggctgaatgtcttctttggggtttgtttgtctttcccgtctgagttttatccatacggtagcattttgctctgtcttgtgatcgtagagtgatttaccgcatgaggctacattttatccattcttctgttggaggaaggttgttatctgcatataaagttgtctaagaaattagtgcctgagtttaagagtgctcggaggaggtctcagtgacactgtaccagccgtgtgtatagctgccttgggggtggttggcggggatgcaggagttagaatcatgatgctcctgaattaatgacccaggggtactgagtcttctcatatcctggaggggcctcagcattgtttggtggtttttaccaggaaaacccaaggaccacgactctccagagaacggtggggacagcttcgagagctccgactcgctgctgaggtcctggaacagccagtcgtccctactggatgtacagcgggtaccttccttcgagagctttgaggaggactgtagccagtctctgtgcctcagtaagctgaccatgtccttcaaggactacatccaagagaggagcgacccagtcgagcaaggcaaaccagttattcctgcagcagtactggctggcttcactggtaagtgaacactcagggccccagtgggctcctatgtgaccaaagcacccccccacccttacccaggccttgtccaagtttgcctgggatactcacactctgaggctccctgtacacaagtcctatagggccaggctcacagacatttttatgttaggatctggggagtagggaagatcctaggccacaccctctacctgggacgggaggtggagaggtaggaggtcggacagactctggctctgactcacactctggatctccaggaatgtaaactgacctggggaagggcaggagccagctcaagggataccagcactgtttacccctcttggcctccaaaaccaacctagagaggatgagagcgctcttctaggcagagagcaaatcttaaagctgtttttagaaccagacaattttcaaaaccggggcaaaaatatcaagaatgttctttttttttcccccagatgactttaaatagatcccctttctgtatgctggccacaagaagtcactgtggattttaaagcccgcttttaaagatatgaggttaaagtgaggatgtaggggttttcttttcattgtcaaaaaaatagctgcatacatgtgtaaaaattcataaaggggtttgaacctgtggctgttctgatacctaggaatccaagaactgctaagaaaaccccacagcattaggagtgtctaccaggatggtaatagcactgctgtttgtttgttagccccgtggtgttagcataggtagtgtggcccaacctgtggcccgtggtgttaagtgtgagtagtttgaaaatccactggtgaatctgttcagaggtgacaagtcctagtggccactcaagtgactttgtagctcagtctggttcagtccctgctatgcttccccaaagccttttatatctgaggagaaggtgacagcttatggtcagatctcgactttccttccctaaaccgtgacagggacccaagacaagttgctctacatccttaagagagacagggccacagcaaacctctttctcagagtagtggttttcagtacccgtgtagcagacagacagttgtcagtgtaggtcacccctgtgtgtcccatgcaacaagtctcacaagaccatttgcttatggtcgtgagggatggacctttgataaaatggccctggagtccacaccccatcctcactgggcattttcagaaataaacttttaaggctcttgtataggaaagcattaaatgtcaagacggttagtgctcatgagagttgctggtcctgtatcctcctcccagaaggagaaacacagcggctgaggtagagccttggctaagccatcctcttggaagcctagtgggtagggaagggagtggacagtggctcctgcccattacagtgtttactgggtgctccctgaagccctgcctactcatcagcacaatgcccagtagagccatgttctcaaaacagcctggtcactgagagagagggtcagatccctgacgatctcagactccccgtgtaactggcctccctttaccccaggaagcggaccaatccagttgtggcagtttcttctggagctactctctgacaagtcctgtcaatctttcatcagctggacgggggatggatgggagttcaagcttgctgaccccgatgaggtatggccactggcgctgtcagtctcagtctgtcatgttggatcttaaagccaatccttggcacaaggaaagccaacagagccaacaaaagccctcctctaccaggaatccctggctcttaggctgaactatagccactgcctcatggatagatgggcctggtgttcattggccagtgccttcctctgtggaccttgtctgtcagaggtctctggtgaccctcagcaagctctagagggagcttgcctttgttcctagttagacaaagcacatagctgcccagcagccttcagggctggcattgaggctccctgctggagaaggctttggtagataggcatgatgccagtgatctgagtaatcgctcaccctctctgcatctggaggaatgagtgtggctcatgggccagaatagtctcttcagctatcacatggcttgaaatgtgtctcagctggcagagtggctgcctagcttgcccgcagccttgggttcatctccagcaccacgtcgtaaatctggtgtgatggcacatgcctacctgtaatcacagcaccttgggttagggcagggggtggggtggggaggcagaaactgaaggatgagagcttcaaggtcatccttgtccacacagtgagtttctggccagcttgggatacagaagactctggctctttaaaagagagaaaggattaaaaacttgaaagaaccatgagggcacgcctggttccaaatggctggtccaggagactgtgctgagatggcgctggggacagagacagggacatcactggcccttgtacagggaaacatctgcatgtatttataaaggcccagactgaacatctgtcggtcccagtgacagtcaggtttttcagggtgagcacccagggtctggagccagtcatgacccaagagaggacataggtgaccctgacctttctgtgtcttctcaaaggttgcccgccggtgggggaagaggaaaaataaaccaaagatgaactacgagaagctgagccggggcttacgttactactacgacaagaacatcatccacaagacttcgggcaagcgctacgtgtaccgtttcgtatgtgacctgcagaacttgctgggcttcactccggaggaactgcatgccatcctgggcgtccagcctgatacagaagactgagggcctcaggaccaccctgagccagccccgggcccagggactgagtgggaagcccgtcctgacccacttgctccaaagacccatgggagggcaggatggtacccctcgggagagagccaccaagcagcagtggcctttcatccacgcctcttccacaagccaatgccccatggtggaaaccggcatagcctctctgtcctgtatgagacccccctgaagggaagagtctctgggaagccaccgtggcaccgagcaggccctgtgcattgtggctatttgagatgctccagggagccagcatgtggtggatacacagacactgagaaacattgtttttcctttggccttttgcctccaggagtagcaaatgcaaaaagccacctctgcttgagagggcccggcaggtggagagtgtgattgtccatttcagaagtcagtttgtttgtacatactattgtatcttataattgtcctaatcctccaacagttctatttaacagaaattgtatattgtatttaaagtaattataacttgtctgaatcaagaatgcagatacctaataggttatccttttatttttttcactcctacataggaacgtcattttacaccgatttaatctcttagaatccaactgagagaaaccgtgatattctgtttttgttttatttaccagcaggaatgggctctgaagggtgacctggttttttcttttgttttgctctcttgttattgttgctcattatctgaccaggactttgtatattggtttttttttataagaaacttaatgttattatttgagggtccatatggcctctccactctcctggactgtaaaagctgtaaagcggtatttttcttgacacatggcacatgttttccacttccctgcatgccttaagccaatttatacacaaatgtattttattttttggcgtaactgggttttccaggcaactcccctcccccagccagtccttcccttccttcgccccaagatattctgtgtgactacaacaagaagactatttttggaaatatatgggatttatgtagcagctatttttactgcaaaagtaactcactggaaaaaaatattgtaatttgtacgaaagctttatttttatcttagtcacgtaaagggagatgtgtcgggtgggcagggctcagggcaatcaggagggatcttccatcagccttgaccttaaacgaagtgtggtgcttcctgtcttgctgacctgctatgtctcttaaccatctgggctgcatgctcctctttctgctccgtgtgctcagagatttgctcctcttatttttttggccatggatacccagaagcacagacagagcaagcatgctgggaaatggtgtcttggaccagttctgtacgaggaggttctcatctagtgaagagctaactccaccatgagacccccacgctttcatctagttgtgaactggcttcgccgtttaccagcatggtgacctcagatcagcaagtgacattgataaagagccgttataccatgagaccacacgggacgtaggaccagctgggacctgctgtgccagtcctgggaggtcttggcctgcatgccccaagagaaatgctttgtggttaagcacagggacctgtttgtcgctgggacatctgtgtgtaatataaacagacatgggacttggagcatcctcctgtcagaggcctaatcctcagtcagtttatgtacagtggagccacatgacattgccaagtttaacctgagtcttgtcagccaacatgacggttttacctggttgaatctaacagtcatggaagtcctcagaagtctttggctgggtcttaagtatgaaggttttgtaatttggcctcctctttctcaaataataaagtatttggtttatgacaatgcctctttgtaatgttggattcttggaatattccttctctttcaccagtcttcacacaaacgaggtagatgaggatttgaaccctcatctgcatgacatgaaagtccagtctacagctcattaatctagaaacaagatggaatccactgatcccttcctcaaggaattaggaaaaacaaaagctgtttatagtggggaaaaaaaaaatctacctgggaaggattaaagtagaggtttggagagagaagagattttaggaagcttgtgtgaattgctagaatctgaagttgaagcatctttgtcgtttgaagccacggcaccatttccctcactggagttctgaggtgacaatgtggctagtagtctcagggtgcatgctctggctcctaggacatgtccacaaagatactgagaaaccacacccatgcctctttacaagtgtcccaactgtattaacattcagcaggggctgaaatcagtgccccatacccatcagggagctggtggcaaacacttggaaaacaccaattggttattgtattacaaattaaaaatttaaaagttaaatcagagcaagagaggttaagagcacttgttgatcttgcagaggacttaggtttggttcccagcacccacctggaagctcacaaccatctgtaacaccagttccaaaggacacaacaccctcttctatggcaatgcaagcatgtggtgtacacacatgcagttgattttttttttaatgttaagaattctcatttcagaatcacatatattagcctaatagcacttagaagatttttttttcaagtacattatagcattgtttcctatgtttacagaactctttaatatttgagctcttgtgtcttgaacataaaaagaaagtcaggcctaacagattcataatcacatcaaggaagactgctcaatggctgtcagatattgtggatattctatatgataccgcaacagacatggtaaccagagaaggtgaactgtggtcagatgaagccacacagtagcttattgttactgtgttctaccacatcagtctattttggatccttgcccgtgtatgattttgtaacctgcattcattatttggaaaatacttcttcaagtgataatacagtttagcagatacagtttctggacttaatatcactgccgtctttacagaaaagtgccatgaagttgtcagactcatggtgacagataaaaattcttaaacattgaaaattcgaccttttaatatcaacaaccatcttttcctacttcatttactttgaaagtatcaagcttgtctcatctaattctgagaaacaatcagccaaatatccatagtaagatttagtttgtcagttgttctttcaggagaaaaaaaaaaagtaattggatgaagtggttagtttagctggcaactcaaagatggctgcacttcctggggacagtcaccatgctttattcagaatgcagcaggcttctattacagagttgaaaagaagtctgttctatgagcaaatgaatcttaactgttttatcaaatccattcttacatataacttttgtgtggggggggggggagagttctcttttcttcacaatgtaataaagaaagcaattgacaacctgttctgacctccgaaggggcacctggaattcttaataatttgctttgcaccaaagccaatgtcaacacagttaataagagtaaataggttggtattattacaaaatattttatgtcagaaacctgaagaccataccttgagagacattctggagaggagagattcttgcatagaacaaaagggacagagtattctagagaagagcaaatgagcccttggcccctggaacccactttcctcctctccattacacccctccatagttaatgaggacacatttttacttaaatacttgaaacctcctctttcttcttccttcatgatgcaccactccaatcctaaaccttctaagaaaaaaatagtgtattttccacttatctttggcagttctgaatcatactagattataattatctgtttaataaaagtgttactttctatcacttaaacaaaatacttgagatcatctatttataaagaaaaaaaaggtttgtttatgatcacagcctgggtgatgtcagtctgtggtcagcagatcacctggctgcattgcttcgcatctgtgttgagtaaatgcttcatggtgccagcattggcacagcagaagtgcctaccctgagaacaaagaacagaagagaaagatgaggccagagtctacaatccccttcaaaggtgcgctccccatgatctgaggatccctcaagagttctcactaggccctaatggagatcaggccatggagctcacacatggacatttgaggacattcaaagatcaacctatagcagcaacaggatgatacgattctaagaactatctctaggggactgggaggtggctttgtagataaaaacgcactcacctcccaaatctgatgacctgagttcaatctgcacaacccacaataagagagaaccaactcctaaaagttgacctctgacctctgcacaagtgctacagcatacacacacaataaatcaattaaaggtttaaaaatggtaaacctttttttttaaatcatttccttgtgatattaggaattgaaaacagggtcctgcattcatgaagcaagcactgtacactgagctgtgtcctcagcacttgaattatttaaaaagaattatttagaaaactacttctaggtacactgtccttttaaaaaaattctaatattttctttaaaggtacaagaaaatgatgtgtgggtttttgcacacgactataaaatatctgctccaagcccaccaatgaatctaatgaatcagtaatacttttattataaggtaattagctatttgtggcgatatcatcagtccagatgttttctatgtgtgactgaggggaatttgatatcatttttataaaatctacccccaaaagagaagggactatgtatatatatatgtagaaaagtcatttttttcgttaacattttattatatttatatgagacatacacatgagannnnnnnnnnnnnnnnnnnnnnnnnnnnnnnnnnnnnnnnnnnnnnnnnnnnnnnnnnnnnnnnnnnnnnnnnnnnnnnnnnnnnnnnnnnnnnnnnnnnnnnnnnnnnnnnnnnnnnnnnnnnnnnnnnnnnnnnnnnnnnnnnnnnnnnnnnnnnnnnnnnnnnnnnnnnnnnnnnnnnnnnnnnnnnnnnnnnnnnnnnnnnnnnnnnnnnnnnnnnnnnnnnnnnnnnnnnnnnnnnnnnnnnnnnnnnnnnnnnnnnnnnnnnnnnnnnnnnnnnnnnnnnnnnnnnnnnnnnnnnnnnnnnnnnnnnnnnnnnnnnnnnnnnnnnnnnnnnnnnnnnnnnnnnnnnnnnnnnnnnnnnnnnnnnnnnnnnnnnnnnnnnnnnnnnnnnnnnnnnnnnnnnnnnnnnnnnnnnnnnnnnnnnnnnnnnnnnnnnnnnnnnnnnnnnnnnnnnnnnnnnnnnnnnnnnnnnnnnnnnnnnnnnnnnnnnnnnnnnnnnnnnnnnnnnnnnnnnnnnnnnnnnnnnnnnnnnnnnnnnnnnnnnnnnnnnnnnnnnnnnnnnnnnnnnnnnnnnnnnnnnnnnnnnnnnnnnnnnnnnnnnnnnnnnnnnnnnnnnnnnnnnnnnnnnnnnnnnnnnnnnnnnnnnnnnnnnnnnnnnnnnnnnnnnnnnnnnnnnnnnnnnnnnnnnnnnnnnnnnnnnnnnnnnnnnnnnnnnnnnnnnnnnnnnnnnnnnnnnnnnnnnnnnnnnnnnnnnnnnnnnnnnnnnnnnncccccccaccccaaccctcatcactggccctgccttccccacctcctattctcaattcctcctgcttcccagcagcaactgggtgcccaggtgtatgagagcaccaaccttggcctcagcctgcatgatttctcaccaggggttggggcacccatcttaggctgcattctgccacactggagtgggcactggcactggcaccaccatggaggagaggatggaatgtagcctagcacctccccgtttggtgcctgagtggcattcaagcatcccagcagcaaggctgaactcgaacctatgtctctccttctaccatgtgggacctggagatcaaactcatatcgtcaagcttagcagcaagggctcttatccactgatccatctcgccagcctctcatacttttcttaactcgagactgagcctctgctgagctgaggagtgtgggtagcctctccatggtggggaaatagtaaagttaaaacaaggggcagtggtgcacatcttgtaatcttaaggttgtcagaagttcaaggctatcttactctacatatgaagttccaggcttgccagagctacataatgagaaaaccagcaagacagggaggaagttaattcagtccctttgtgcttatatctcttcttggcctgttggcataaaagacatattgatcaactggattaaaaagaagactcagagataatcccacacacttacagacacatgatttttcataaagaagtcaaacagatacactggagaaaagacagcatcttcaacaaatagtcttggccaaactgaatagctgtatgtagaatataaatagatccatatctatcaccctctacaaaactcaacatatcggaacgtcaacctaagaccaggattcctgaatctcataaaagaaaaatgaaggaatgggcttgaactcatgggcacaggaaaagaatttctgaacaggatattgatagcattaaaacccaatcaataaatgggacttcataaagctgagaaccttcgtatggaaaaggataccaccaggcaaagcaagaccctacagaataggaaaagacctttgccagttaattatacacctgatagaagtttagtgcctaacatataccaagtactaaaaaaaaaaataatcaacaaaacaaacatcttggtcaaaacggaatacagaactaagcagagagttctcaaacgaagaaacacacaaatggatgaggaaggctaaagaaatgtccaacatccttagccatctgagaagtgcaaacttaaaactaccttgagatttcatttaccccagtcagaatggccaagaccagtaaaacaattgacagcatatgctggcaaagatggggggaggggaggcttattcattgtataaccactatgaaaatcagtgctggaggctcctcaaaaagctgaaaatcaatcgaacacagtatgcagctatattactcttggccacatacccaaaatactctctatcttactatagagatcctcactcatctgtgtttgttgctgcactattcgtaatagctggagactggaaacaacctagctgtgcacctcctaataaataataatgaaaatctagactattatataatgaaatattttgcaactgttaataaaaatgaaattatgaaaagttcaggcaaatgagtagagctagaaaaaaaaaatcatcctgggtgaggaaacccagaggaagacaaattttgcttatttcctcttatgtatggatgccatctcttaagctttagatatgtgtgcttcaaatatccatcgaggtagataataagggactgggggcgggatcttccaaggaaggggaaagagactgtagtgctataaagagatacagaaaacaatattaggagggtgaaatatggaggggggggggagaaggatggatgagagagttgggggaggggtaactaacaccaaaggacttctgaaaagtaatacagaaacctactctaaaagcttcctaaagtatacacatatatgaaaggaatgtaaatggagtcactgtgtaaggggcaagacaatgcctcaactgcacatcctatactactaagtataatctccagcatcaggaatgccttacatcactggagagagcagtccataaacaggtctgccctcacccccaataccacaggctgttgcaaatgctattggttgctatccacacatgatggtaaggccctatcgctgaagacacagcttacgtatgccatcaaccatgaagaaactgagatgctgcccaactagaggcttcaccaggtctgaccagcagacacagtacccggaagttactctgtgctctaccagagggggaaagcagtcatcagaaccaaccctcagcctacagcaatcaggcgcttgtctgatagactggtgcaggtgtggcacaaaggttatggtaataaccaagcattttttttttttttgccagatttaagacctactccatgagacagaacatataggtgactctgaggttatataggtcatgggcctaggaaaagatcaattactgttactcttctaaaggacattagcaataaaatgtagcttaatgctatactcctatgcccacagatgaaagcatctctcagcccctaccagagaagcttcttgcaatagatgagaattgacacagagacccacagctagataacgtgcagagaagatgtctttatcaagccctgccagacctcatcaaggctcagggacctttatgaaagtggaggggaaagattggaagagccagaggtatcagatataaaaggattgataaaataataataataataataataataataataataataataataataataataactcacagagactacagtagcataccaagacctgcacaggttcaaaccagacaaaatctcagcatggaggaagggaagtggacacaaagtatcacccctaactaagaaactatttgcaatggatactttctggtagaaggaaaaatccattgtctcaaatggctatccctgggaataccacactccaaggcaggtcccatgcccaggagtagttagctaacacaaaaccaactccagaagttttgtttgggggaaggggtccggcacactattgttttgttttgtttggacatttttttttgtcctattgactttttttttttaggtttatgttttaattttcagtttttgggttttgtttttgccttgagagacgcaaagaacatgcagttgggaagggatggaagtaggaaggatctgagaagaatttaaacaaggggaaaatatatgatcaaaatatactgtataatttttaaaataaaatgttatttattggtgatggcattccttctaagctccaccccacagttacctggcaacagccaggtgtgcctgactcactataannnnnnnnnnnnnnnnnnnnnnnnnnnnnnnnnnnnnnnnnnnnnnnnnnnnnnnnnnnnnnnnnnnnnnnnnnnnnnnnnnnnnnnnnnnnnnnnnnnnnnnnnnnnnnnnnnnnnnnnnnnnnnnnnnnnnnnnnnnnnnnnnnnnnnnnnnnnnnnnnnnnnnnnnnnnnnnnnnnnnnnnnnnnnnnnnnnnnnnnnnnnnnnnnnnnnnnnnnnnnnnnnnnnnnnnnnnnnnnnnnnnnnnnnnnnnnnnnnnnnnnnnnnnnnnnnnnnnnnnnnnnnnnnnnnnnnnnnnnnnnnnnnnnnnnnnnnnnnnnnnnnnnnnnnnnnnnnnnnnnnnnnnnnnnnnnnnnnnnnnnnnnnnnnnnnnnnnnnnnnnnnnnnnnnnnnnnnnnnnnnnnnnnnnnnnnnnnnnnnnnnnnnnnnnnnnnnnnnnnnnnnnnnnnnnnnnnnnnnnnnnttcccctgtaccataccactcatccaccaaacatgcctggcttctctctctctctctctctctctctctctctctctctctctctctctctctctaacacaacagttgttatttttaaaaaggaatcatcaacactactgcagatgtcacactagggctccttcaggctcccagttcctctatccacagcccttggtttgcatttcaaattacccatgaccttcagatctcttcatctgggccagatgctgatctgtcagctctctcagagcaatacagaagggtgagacccaaaagcttagccggggaaacccccggttatgaaa

SEQ ID NO: 830 - DNA, 1553 bp, Mus musculus
cgtcagtccccgccaccttccccggccccgcgcgcccggatcggccctacggcctcgtctcgcccggccttgcgcgccgggaccgccgcgatctcctctccccgccgccctccggctggccctgcctgctgcggcgcgatgaatgactttggaatcaagaacatggaccaagtggcccctgtcgccaacagttttcgtgggacactcaagcgccagccagcctttgacaccttcgatggctctctgtttgctgtgctcccttctctcagtgaagatcagacactccaagaagtgcccacgggcctggattctgtctcccatgactcggccagctgcgagctgcctttgctcactccctgcagcaaggcagtgatgagccaagccttaaaagccaccttcagtggcttccaaaaggagcaacgacgtcttggcatccccaaaaacccctggctgtggagcgagcagcaggtgtgccagtggcttctctgggccaccaacgagttcagcctggtgaatgtgaacctgcaccagtttggcatgaacggccagatgctgtgtaacctcggcaaggagcgcttcctggagctggcgcctgactttgtgggtgacatcctctgggaacatctagagcagatgatcaaagagaaccaagaaaagacagaagaccaatatgaggaaaactctcacctcaacgcggttcctcattggatcaacagcaatacattaggcttcagcatggaacaggctccatatggaatgcaggcaccaaactaccccaaagacaatctcctggacagcatgtgcccgccatcggccacgcctgcagctctgggctctgagctccagatgttgcccaagtctcggctcaacaccgtcaatgtcaattactgttccatcagccaggacttccccagcagcaacgtgaatttgctcaacaacaattctggaaaacccaaggaccacgactctccagagaacggtggggacagcttcgagagctccgactcgctgctgaggtcctggaacagccagtcgtccctactggatgtacagcgggtaccttccttcgagagctttgaggaggactgtagccagtctctgtgcctcagtaagctgaccatgtccttcaaggactacatccaagagaggagcgacccagtcgagcaaggcaaaccagttattcctgcagcagtactggctggcttcactggaagcggaccaatccagttgtggcagtttcttctggagctactctctgacaagtcctgtcaatctttcatcagctggacgggggatggatgggagttcaagcttgctgaccccgatgaggttgcccgccggtgggggaagaggaaaaataaaccaaagatgaactacgagaagctgagccggggcttacgttactactacgacaagaacatcatccacaagacttcgggcaagcgctacgtgtaccgtttcgtatgtgacctgcagaacttgctgggcttcactccggaggaactgcatgccatcctgggcgtccagcctgatacagaagactgagggcctca

SEQ ID NO: 831 - protein, 514 aa, Mus musculus
RQSPPPSPAPRARIGPTASSRPALRAGTAAISSPRRPPAGPACCGAMNDFGIKNMDQVAPVANSFRGTLKRQPAFDTFDGSLFAVLPSLSEDQTLQEVPTGLDSVSHDSASCELPLLTPCSKAVMSQALKATFSGFQKEQRRLGIPKNPWLWSEQQVCQWLLWATNEFSLVNVNLHQFGMNGQMLCNLGKERFLELAPDFVGDILWEHLEQMIKENQEKTEDQYEENSHLNAVPHWINSNTLGFSMEQAPYGMQAPNYPKDNLLDSMCPPSATPAALGSELQMLPKSRLNTVNVNYCSISQDFPSSNVNLLNNNSGKPKDHDSPENGGDSFESSDSLLRSWNSQSSLLDVQRVPSFESFEEDCSQSLCLSKLTMSFKDYIQERSDPVEQGKPVIPAAVLAGFTGSGPIQLWQFLLELLSDKSCQSFISWTGDGWEFKLADPDEVARRWGKRKNKPKMNYEKLSRGLRYYYDKNIIHKTSGKRYVYRFVCDLQNLLGFTPEELHAILGVQPDTED

SEQ ID NO: 832 - DNA, 39079 bp, Homo sapiens
ctgtgtgggactgtcttggatggcaggtcaatggcacatctctggtcgaggaggggaataaggacaccaggcaggggagatgcctgagttgaaggagtgagaccaaggcagaagcccacccagaggatgagggctgagggaaagagaaggttctcatgcacagtgaacaggaagcagggggctctccggacccggaagtgaccctgggccggccaggggacagaccagtctctactagaccatggggctggctctgggggtattttaggtctccaggttgatgtctgcaaggccagcttttttttttttttttttttttttttggagacaaggtcttgctctgttgcccaggctgcagtgcagtggctcaatgcaacctccacctcccaggctcaagcaattctcccacctcagcttcctgagtagctaggactacaggcacgcaccaccatgcctggctaattcttgcattttttgtaaaaatggggtctcaccatgttgttcgggctaaggccagctttttcttgctgatgcaggaagagggactggatcagactcaaatctgagaggccctggaggacccagctatgagaaactagcaatgaactagagcaggagggccaaaggcagcctgctggcttcttctcatttttccagcctctgacacctcacaccattatgaacatgtaattgacctgaatttgtaaattcttattcttttttttaatgatttctttcctgcatgaatggcagagggtgactcatccccagggacggggctcaacctttcaacatgaactcaccaccatgtaacgcgtgcggcccccactggctgaagccatttgataaatccctttttctcatttttacagagagaaggtctaagatccaagctacagcctaattcagccatttgccctttacccgagtttttcaatatactccacactttcttactcctgctgagagccccactttccttgaatgcattcctctcttggctccctccctgccgccggccttctccctctctctcccttccaggtcacttctcgtgatgagattggacttgtttcctggggctctggtaacaagttagcttaaaacagagaaatggaccctttcacagttctggaggccagaagtctgaaatcaaggtgttggaagggccactctccctctgaagccccagtagaggatccttcgtggcctcttccagctccggggtccctgacaccccccggcttatgcccgcttctctcccctcactgcctccgtcctcacacggccatcttctcatctccttgtatctcttctctgtgtgtctcttataaggacacttgtcatttgactcaggacccagcaggataacccaggataatctcgtcttgagatccatcacttactacaactgcaaagtcctttttttagatggaatttcgtgcttgtcacccaggctggagtgcaatggcacgatctaggctcgctgcaacctctgcatctgggttcaagtgattctcctgcctcagcctcctgagtagcagggattaaaggcacctgtcaccatacccgtctaatttttgtatgtttagtagagacggggtttcaccatgttggccagtctggtctcaaactcctgagctcagatgatctacccacctttgcctcccaaagtgcgtgagccaccgcacccagccagggctgctcttaaatgatgaaaccaatgggctctacagcctcaaatgctgagggtcaagctgtgtcctcttctgccaagaacaaggaagtggtatgtctgagtgatatgtcattgctcattgtctgccataaggttgggacaaagagcagaggtctgggcctggctctcagcttagccagccaggcccccgggccaggctgagtcactgtgtcctcactgcttaacccagggtagcagtgctcactctgcttatcgcagggcaaggggcaatggagctgctatctgggaaacagtttgaaaactgtgaagggctccacaggtaaagtgccattctgtttgttttagtggggaatcactctaggaaaaaattaggaggattttggtcctgaatcctctagaagtgtgctctgcgactttgggcaaatcatttaaactgaagatagtaatgctactcaaaatcagtagtgtcacagacgtgtccacctaggaaaggtataaagtactatataaatgtgaggttctatcattattatagtgtttaccatttcagcaaagtattgtaaaagacattacataatgcatttgcatctttttactgataaaacttctactataagcattagtacttactaaccagcattttacattttcctttgaaagggcgaaattccttccgcagaattaaatcgtgtaatttttccaacagatatttattgagtgctgtgcatcaggatttattctaagcattgcaggaaagtagtgaacaaagcagatataattccttccctaatggggtggaatttgtgctgtggagacagagaattattaaggtaaaaaagcaaaagataaagaacgtaacgataagggcttaagaaaaaaaaactcattcggtgtcagaaaggagttgttgaaattttaggtggggtggccagggaaggcttcaccaaaggtgactatttagtaaagatctggcagcggtgacagtaggagtcacacggactcctgggaagacccttctagggagagggaacagctcaggagggagttggcctggtgcccagagcaggaactgaacatggaggcagagactcagtcatgtaactgctggaggctgagtctcagggcctccaggggcgtggcgggcttgggctcaggcctttcttctgagtcacacaagagctgttggagggttttacctgaggacggacaggctgactgccgtttaaacaggatccctctggctgctgtgttgagaatgggtatcacgtttagaagccttttgaaataagtatttgaatgcacaagtcatactgaaagtcattttttaaatgtcaaatgcttgccttttcccctaaactagagcaggtcattcttgcagtgaaatagtccactcacttttctatagtaggatgaaaagaaagaaacgagaaggcacgacttgctgtatctagtcaaacattcttgctaccaagaaacattcacgctccgagtggagaaggggctgcctgcatctcgtgccctctgggtgagcccggctatgtcttccttcaccaccctctgctgggagggtgggagctgaggggacaaggacacctgagagaggcctgtgatgggctgcccagtgccacccaagcccctactgcacatcttccgccccagcccaggttggtccagaaaaagaacatcaagtgttgttacccaattctggtgtcaaagacaccctaagagtcctccattgctactgaccagcagtttcacatgtacctacaaacagaaatggggtaattgggtttaataaaaaaaaaaaatacattggccataaaaaggaatgaagttcatccatgcagtacatgctacagcacaaaagaaccttgagaatattatgttcagtgaaagaaggcagtcacgaatgaccacatattgtatgattccattcttatgaagtgtccagaacacttcataaatcataaggcaaatccatagtatcggaaggtagatccgtggttgcttagggttgggggtcggagggataatggggtgatagctaatcaaaacagctttgtttttgaggtgatgaaaatgttctaaaagggacttcgataatggttgtacttacctgtgaatattcttttttttaaatattctttttttttttttgagacatagtctaactcactctgtcacctaggctggagggcagtggcacgatcttggctcactgcaacccctgcctcccgggctaaagcgattctcctgcctcagcctcttgagttgctgggattacaggcatgcactaccacacccagctaatttttgtatttttagtagagatgggatttcatcatgttggccaggctggtctcaaactcctgacctcaagtgatctgcccgcctcagcctcccaaagtgctaggatcaatggtgtgagcccaaaggtgtgagcccaaaggtgtaagccaccgtgcctggtccttacctatgaatattctaaaaaccgttggattgtatagtctaaatgggttgctatggtctgaatgcatgtgtcccctcaaaattcctatgttgaaacctaacccccgaggtgatggtgttgaggtgggacctttaggagataacagatcatgatggtggggtcctcatgaatgggattcgtgcccttatgaatcaggcctgaggagccctttatcccttctgccatgtgaggacacagcaagaaacagagagcctcaccagacactgaatctgctggtgccttgatcttggacctcccagcctcccaaactatgagaaacaaatttctgttgtttacaaattccccagtcaaatgtattttgtcatagcaggagaagtggactaagacatggatcaattttatggtgagttatacgtcagtaaaggtgtttctataggtgtctgtcacacacatatgcatacatagatgcacaaacacacaaatacaatgctcttttgtgacttctaaaaaagtttaatcacaaatggaagtatttacactcagccaggagaatctgtaaacatgccctttcaattccattgtcaaacaagaaagaatggtttcaaggcactgagacagagtgagtacgacatggaaacccaaccctaccttgggagcaggggctgacaacccaccactaggatgtaccctgtgtatctgtagtgctggctccctgcacacagggcaaggtcccgtccaggaccatctgcagaatttgcaaggcccagtgcaaaatgaaaatgggcctcttatgcaaaacttattacaaatttcaagatggtgaccacaaagaattaagccaagtgtttctttacgcttttaagaggtatttccttgctagaactggggcaactcccatggcgttcagtgagaatcttccagaagatgagggctggtgtcctatgccttaagagctaagagtggaggtgctggccctcctctggttcttcaacctgcaccaaaggggcatgtcccaggtggtgaccactggaatttagaggtaaaggcagcatttgcctggagcagagaacacgaggtgaggcgggatgactctacaccacagccatagataagaggtactaatagctcagtcggtctgaaagagacacacttaaagtcataaatgggaagacgtgggtggaaagtcttgcagcaattggaaagccattccaccaaagacgtgttataacttaaaaatattccaacttctgaatgatttctttatacacctgcttaagtcggtgacattattcagccttaacactttaatccaagttttattttgtcaccaaaatgtgagttaagctaacttaatcatttgctagactgactggcacaggaatgactaactcttggtttgtgtgaagactagtggttcagttttctagttagcaaaatacataagccgatgcactgaggattattcagttccatgcatactgttggaatcattttgtgattcagacaaaaacacacaactataaaatcatatatctgtacacgtctgactcagttcagacacatttatttagggattatcagttttacagaatacaacgggtcgctattactattttggttgttcagacttgcctaaagcacgtcactgtgcagtttgatatcatggtggattttcaagcggtttataccctcccagagtactgccttataagggaaaatgactgtgtcagggtggcagtgtgctggacgagggggcaggaggcctggagtgtggccccagcttcgccaggaaataggcatttgaccctgggcaaggaattgatcctccctgggtctcagtttctgcatcttacaaaccagagttggtctgagccatcagctctctgaagttttttccagttttaaaatccaatgtttcattttctcgtttctgaccaccaaaggcaagaaaaacatagtcaaagacaccatggttcccattgacagcactgggattgattttataccttgttgtcaaccaaaagtgccagtgcagggcagcagtgatcagcgatgcccgcaggagaccaagacttccagggccaggggacctgctacttatttatcacacacttaatgacacgccagacactgttctaagtgcttgggagacattaacagagggaggccccgaggggcccacaggtggcctgctagggaatggctgggcgggatttgaccccaggcagtctgggcccacaggctgcccttcagaggtgaagacggtagccctagctgggtaaccatgtcttcatgcccacagggagtgcaagggacaaaggaggctgacaaggagcagaaggaattagaaaggagcattagcaacgtttttgaccaccagcagaataccctatctgccattccaaggaatctcacagaaaagactagacactggccaactcttgcataatctgggtccaccctgatggagcaggaggcagctccacggccccacatctgcctaggattcttggtagctgggccagcctgcaaatgggcaaggttggttggattcggaggtgggcggaagtgtgggttaagcttatcaagtccttgaccccaacatatatcagtgaaatagccaccactgccagacaccccagcaggccagatgcaggcggcagcttacacatgaggaaatgatttctatctctaggttcattcttttcttcctccactccttaccaaagtctcactgtgcatgtgattttaactgaactgtgcacttcacttttacttcttgagggcgggaactaactaagccttaatcatatttgtcttctcagcatctgactctgtgtttgctaagtgaatgaatgatgcacttcggaccaaatgacgtctgtttaacttgcaactggaaaccaccacaaactgcctgttgactactgatttggattttaaggtaaatacagacatgtttctaaggagacgtttttgtgtgtgttttttttcaaaggatgacttcgtaagctagctaatcatttctcataattatgtctggattctaaagaattctttttctgcattttactctctagatatttcatgttcgtaacacatatattctactgtaatatcccttttcctcctctcttctgtgaatgtccctctttcttaaggggaaagtgttaacattgctcataactcagtctgccatagcgcatctgatcactccaccctgtgcaccttctgacttttaatttccttccaacaccctcgacttttgatctccaagcacaagggctatacttttatttattaggtttaatttactgtaaagctcattgttccctgtgaatcgcacgataacagtcaatgaataatcactggcttcagccagactgctttttaattctgctgagtaactggcaagccaactagtattaaggacaaaaatgtaaggaaccctgatattgccccagaactaggataagccattttattatgaacatgtgactgccctcgtgcagaggtggatcagctacagggcaggacccagggcaagggggctgcttggggcagcctcagactctttggaaggggaaatagggaggaccagggacctgggtgggaggcaggagcttaggcttacgatgaccccagcacacaggcccagcttcctcttcccacagcctccctgccgtcttagctctgccatttggtcttccggccgggatccctttcccaaggctttcacacatttaaacccgcgaggggcaggactttttttttttttttcgtgtatatgatagttttttcaaaatgttttctataaaatcctccctgaggagagcttggaaaaagattcttaatagctagatcattttgagtccttctctaccatgtactcaacactctaatatattctgcacatttggttctatgtcatttgccatagtcttaaggacgtaggttccataatcatcccttattctgtagaggaggcccaaggttagtgagcagaggaaggttccactgtcgggaaccggtggtcttcaaactcctgtgctcctcttttgatatctttctgctcatatatgttggaaacagcccagcatgagcaaagcaccacctcctagcccccagcctgtgccagccctgcaaagaggaaatatggctccactcagggagcccatcagcgactaagggagccctggagcacctggcactcagcacccatgaacacgagggcaggcatggtgggacaaggcagtctgcttggggcaagtgagcttcgggaagtagctgagctttggggagcagctgtctatacccagcttctcagggctgtgcaagtagcctgagggagaaagaccctatattagctgaaactgcagcccagatgagtcagtattttctgctacggttttttaaaaaaatagtaacatactcatgtctccatggtaacttactatggatctgtattccatttatggaactctttcttgacctatctgtgttctctaatctgggcctgaatatacactgagaagccatcagaatcaattcagtctccaagaaataatcacttcccctatacgtgattgtttcagccgtatagattctgactgtgactcatgccacggtgatacccggagaccttcggggacccagaaacattaaggtgcaccgatatctcaattatccggataactctagacctagagtcaccatggaaacctagaaccctgagtcacagagaagctgggccattcctctcccttcccggtggtgccgcagttcttgagatgtgagcagctttcagccccgtggcctcgcctaagctggggtttcctatttcatccacaacttcaggaatctaaactttcctgcaaaatattgagcatgtgacctgagtccaaacagccatggactcaagcaccttctgataaaaacggaaaccacagtgtagggggtggttttgaccagggtttcggagtcagataaactcaggtttccaccttgaatttctcatcaatctgacgtggcaggttattcatcctaaggttcagttcccacctgtgtaaagtgggagccgcaagtcctccgagagtgacgatgatgtgcgtggagtgcccagcccagattgaagcgcggccaaggcgggtcgctatctgggcaccgctcagctccagagggcgccactcccgcggagcctgcgggatcggggcttcccgggagcagcgcgatcagcaccacgactcggggacacagccagggcccggtttctacaggaagcgcctcatttggagcctttttgtgatagaatgatcattagtcctaagcccattcagaggttcaagaatggggtcggctcaatttcagggccttattacccaagcccggctgcccttcggtgccaccagcaccactgctccgtcgctgcggaattccaaaggcaggtttggcgttagggccttggccccagagaggacgccgagcgctccacggaaagtctccgcccggctcccagggcgcacactcgcgcgcacgtggggccgaggccctgctcccggggcctcagggccagccggcgagggacccagccgagtgacagcaggaggcggagggaaggttgggccggaaggtgtcagccccgccccgcgctccctcgccgcctccgccctcctcttctctcccctcgtgcgttccctctcctctccctccgctcccccaaccctcctgctgcccccttccctctcctcccgcttctccccatcctgcctacctcccttcccctcctcttctctctcctccccttccctcccctctctcttctctcctccctcgtttcctcccctcccctccactcggccgtccctccttcctcctccctcctccctcctcctcccgctcctgaagagcgcgccgcgtgggggacggcccggttacttcctccagagactgacgagtgcggtgtcgctccagctcagagctcccggagccgcccggccagcgtccggcctccctgatcgtctctggccggcgccctcgccctcgcccggcgcgcaccgagcagccgcgggcgccgagcagccaccgtcccgaccaagcgccggccctgcccgcagcggcagggtaagagctgggcccgcagagagcgcccggcgcgcggctccagtcccatggagggtcacccggggcctgggcgggggtcgcggggggcactgacacgcagatctcggggcgctgccgggggtgcaggtgggggtggcggctgctgcgaggactctaggggcgcgcgtctgagttccgcgccggctcgttttccggttatggagtggcctccggggctggcggggtcggccggggggttcctgcgtgctagggccgctgtcttcggggtcgcctagcggcgggcgcggccagggcgcgctggcttgtttcgctcgcttttgtttttaaaaggaaacgcaggcctggtagggggtcctgcccagtggatgtcccggcgaacatgatttcgcgaacgggagtgggggcacaggagagcgtgtccgaggtggcctggcgccccggctttgagggtgacttcctggagcggcgccgggcccggaggatctggggcgcccaagacacctgaaggctgcggcaccgcgggaacctgcggggcgcggggtgccatggtcacctgctcgccgcgtccagggcccgggctggggacccctcggtcgtgcgaggagagcgtggggaacctgtcggaaatgagatctggttgcgctgggctgcctttattttctcgttcctacagcatttgaatgaagaggtaactgagtgtttgcttgtgtgtgtttgggttgcgtgtgtgttatcctattttattttttacggcaggagaccttttatgttagcctgtacacaatttcagggtagcctaaaacagtagttgacgcgctagttatttagaaagtaaagaaatgagcagtcccctttggagacaggagtaatttattttaattcgccagtaagagattatatttgttccatacaatggaagcgcctgtgcgttatctgcctgcccacaccaccaccaatcagagagataaatctccacgttaagctttattaaaattctgagtagtagcgcagcacagtaaatgttagcaccgaccatccgcagggaaatgctcagatactcatttctgggattagtcattcatctctctaaactgatcgctttcaaagcgaaaaaagcaaactaccttcaaatgtgtgttacaaggttgtgttgtttcttttttttgtttgttttcaaatttatctaaataatcttacataagtgattacttgttccaataagggtactgttgtcaggcaaattctccttgtttttaaatgtaaccattctcagctgttacatttctgctctttatcctttttttttttttttttttggtttaaaagcagcgatccatcagcaacaccaaacttgaaattgatttatgtggaaaaacttggcttgtctgccatctaacaagccctgttgagtaaaataagcaagcttaaatttgattagttgtgtgtctgcctgaaaccatttagtagagcactttaattctgcatggtttttacaaaactcattaaaagctggacaacaaaagaattctattctgtagctagtaattacagctctttatgtgggagtggtaggctgccttttctcctggtatttgtacacaaaagctggggagagcttttccactgccttccacattcattctctgtccatctcagagaagctgaaaaacagaatcaagtcagcaagcagtctgcaagcctaaggaagaaaaagagctgacccatccggctctggatggataactggcaacacccaagatgtctatgattttggccttctgtttgaggcttgtttatttctttaatcagcagctaccaggacttatttcatgcagagaaatgacataaagctctagaggaaggagcatttcacattggaaggagtagtgagaagggcctgatctgataatatcaggatgggtgggaagggtccattcctcatcattcatgttctcccggcacagaggactgtgtggaggactcaggatttaggaccatactcaactggggtttgatctccactttgccctgcggtggcccctctggtagctatgtggatcctgggcagattgtccatgttgctgggcctccgttgcttcactgtatgacgtctgcctctcagggatgcaggaagattcaattaggtaggagtggatggtcccccagcacggggcttagctcttagtaactaggcattctggcaatggcagccatcaataggagagactattgattgttgagtgaatataagtggcataatccaccaagtggagattctgagtgaatgtggccactttggacccaagactgctgcccctctctgtcctctcataggactattatttattgccagtgctgaccagcctttgttggctaccatgatcattacctgcactccgagtgttttaacagaattttctgatgcctctggcctcacctgctgccttttagccaagaggggtgtgtgtgtatgtgtgtgtgtgtgtgtgtgtgtgtgttgggtgtgtgttgggtagcagggttcttggaaggtctggtttagccataatgttgatcataaagagaaaacaagaaaataaatgcaaattaaatagttcggtgagcctttgttatttcgccacatccagtaagttctatcagttgaatgttgtctgaattacttaaaaagttctcagttgtaaacaggtaagagcacccagtggaggccatggagctaggcttagagctttgccaccagccttcagttccatagccatgaacctgggagggcaaggaatcaccctagaggtgaaggccattcatcggtgctaacccaaggtctctgaaaatgagttttagttactctattatctaagtatctttcttactgatatgtaacttacctggctgaacaattacattttagagctccaaataaattttcagcctattatgtcattgtccaattacaagcctcattgtaatagccatgttaaaaacaataaagccggtgaaattgatttcagtgtatttcaaattaacctaatatattcgaaatattatgtatgtataaaaattattgagcttttttcttttttccactaagtctttgagagctagtgtgtatgtgtggatttgtactagccactggttgagagctctgtagccacacatggcaagtgggtaccatattgcttagcccaggcctagtagaagattaagactcagtcagaggaagtaaggcagatccgtgcttggaatcagttcctcttgaagaagtgcacagccaagcaacacacaaagcagaaatattttgagctctgtattcaaagcaggaagatctgggaccatgtaagggggtttggtcttcagttctccctttgatcccttccctgggtgtgtgctttcttacagcctggagagtggaagggaagagagggggcttcctggactcctttcctgtctctagaaatgacccctgcagctgtcctgaagctctcaggttaagctgattgtgtccagagcagacaggaggcggcccactgccccactgtacccacccaagcactcacctaagctggccatggaaatgtgaatgaaaagcctgacccaggccctcttgccctgctaacccagcaaggaggctctgaccagccagccagcaagtgactttttctgtgacatctaagtggaattcagtgaggaatcagcattattattcaatcactgaaacagcatatcccgttgtgatactgagaaatgctttcctcttgagacctttgggaggacagccatttaaacaagaattccctgcattcacttttgaattacctgttagctgtagaactcagccaggatcaagtcttgatgccaccaatgatgagtttagtgtacttaatcttttgcctctttgactttttttttttcttttttaagatgaatgatttcggaatcaagaatatggaccaggtagcccctgtggctaacagttacagagggacactcaaggtgagtgggcaagtcttaatttttttttttaattggaaaactcgatctctaggaggaaagaaaaaaaaggcctgggtcccagaaaactggttgtagccctagcttcttaatttattggccatgtgactatagactatttgcttacttgctctggtcctcagttttctggtctgcagaatgggtatcttgatgtgtgttgttcttctcctccacgatatgaaaccaaaggcctttatagcttgttttctgaggctccttccaggtgaaaatcctataactcccaataaaacagctggagaggctgtctctactgccttttctgtctacccaggagtttccttggttgatgggaagctgtttaagaactgaaatgagagagaagaggcagacagacccaaccgctacagctcctatcagaaagggcagcgcccgtggaattgtaggtagcctgttactggctcagagaacaagcaggcctacttatgttaaaccaaaaaccagatgaaaaatgaaagcgccctctctgctgcataaacattttatgtagcttctatcatcattccttttgggaacattctttagtagcacaaactggtaatctcccacttgtcttctccaaatatgacagcaagatttgattgttttcagtattatgtagtaaacatgtttcagaagcatgattttaaaattggcctcctcaaagtttagcgtcttgcataatgatgatgtacgtctctggcatattacattttcctttgtatatcattattgaggttatttgtctgatatgacccaaagaggcaaaactcagcacagtcctttctgcagtattctaaaggtcatcaaacttcagcctagtgagtctgcttgtttgatttggccggacattttaagcatggcagaagtggtacaagaaatcatggtattaagttgaaaccacaccccttagaaaaatccttctattaattcaaataatttgacgatgcttatgcggtttctgaaaagaagcagtcgttgctgaaattgatgtgttgaaataggaagcacagatttgtattgtcttttggcttcctggctttaaaaaaaaaaaaaaagaatttacggttaggaaaggcatttcttagtcacctgggcaatgcttgtgggaactttaaaagtttattggaggtttcaccaaaattagctctgctctaaagtagtttgtaaatccagatgagtaatttgcacttgcctgattgatcggttttcctcgtagatctcaggcagttggtcatcattgacttggatttttttgggctgggctccagcctctgcctgccctcttttgtaatgcgtcattcattgttctgcatttctaaaaagaaagcgggtaaccgattttatttgtaaatgtgttacacattttcttattgatgactcaacagatgggtcattgtattacacataacatgggatttccagcttatgttggaaaaatatagtctttcttcacgtgttcctcaacaatttaggcgatgatgaatccagatattatcggttactttcaaatgagtcttacattaaaaggtatttctttcataaatgttatgtaagatgctcagaaatcgagttagtgtaaggttttatctttctgtgtgtctcttcttttctgcagatagtttagtttaactttaaacctatttcctttggaaatctttccccttagtaggtgatttgggttttttttgttttgttttatttgttttttcgtttttggttttaagcaacagggtccttctctgttgcccaggcgggagtacagtggcttgatcgtagttcaccgcagacttgaactcctgggctcaagtgatcctctggcctcaacctcataaagcactggggttacaggcataagccaccccgcctggcctgggggcggggagggggttcatttttaagacactttacttgttataaaatgaaacgttaaggaattttgtcatgtattactattttccaaaccattggaattgatgtggaaaagcatctctagtttcagttaaattgtttcatggcaaacatttcaaaataaatgcttccaaagataaagtagtgtatttcattgtttgatttttcagtgtttatcgggtcatttgccttttaactgcattgtgctcagacggccttgtcaagggtcatttttcttacacacacagcctagttgaatttttctcaatgtaacaggagggtcaggtgtttggtaaaggggtctctgaggctcctctcgacaccattgtaagattctgttattttcagatttgtgtatttaatatattaacttaagtggattaggccactaaaacaaattcccagtcactccgactctgtgaggttacttaaataaatccacagtggccgggcaccgtggctcacgcctgtaatcccagcactttgggaggccaaggcgggtggattacacgaggtcaggagtttgagaccagcctggccaacatggtgaaaccctatctgtactaaaaatgcaaaaattatccaggcgtggtggtgggcgcctgtagtcccagctactcgggaggctgaggcaggagaatcgcttgaacccaggagggggaggttgcagtgagccaagattgcaccactgcactctggcctgtgtgacagagtaagaccctgtctcaaaataataataataataatccacagtaaaatacaatcatttcagtcactttgaccattttacgagtctgttttaaggactgactggttgattccatgtttgcttcaaaattgccagtttaatcagggactattggtaggattgcccacagaccacttttacaacaggtaattcaatcagtttaaatattgtatttccattttttttccatctgtttttgcagcgccagccagcctttgacacctttgatgggtccctgtttgctgtttttccttctctaaatgaagagcaaacactgcaagaagtgccaacaggcttggattccatttctcatggtaattggttcctcagacttgacaaattgtgcatgattttcctaagtagttcagttaataaagagatgacagttcctaagtgagaaatgttggtatctggaatctttgatatgaatagccagaagttctggacctgggagaaggcagtttttcatttgtatcaacttggtgattctgatgtggattctgatgtcttgagtgccagacgccccccagtgagccgctgttaggaaactgcaggggaacccctgagctgcccctcctggatgttttcaacattggcaagcaggtcctcatctccctgctctgccctggaaaacagacagaagagtagacattaaaacacacccaaacttgttatttgggtttgcatcattagttaaatcatctcccctgccctgagttttggggcaacaaattgttctttgtaatccttacccatcggtagttctttctgtagttcttcgtgtcattgtttattcttcttaaaggaatagcacgtcagataatgttcatacaattactgtgacagagctattagttggaaacatgccagagatgactgtgtcatgtgaagtaggtgctgagaatacaggccagaaaattaattaaaacgcatacactggcgtaagcataaccctgcatggcagccatttatcattcttgaaattgctgagggtgtctggagaagattgtttttcaataaaaatggaaggtgtggttccattaccgtgctaagtgcggcacattcatatcacactcacttctcagctctacgcctagtttaatggaagtgacttccaaatgatacagtcccttcagccttttgaccagaaaccatgcaactgttttcattgcctacaattttaaaatagacttagcagttttccctacgcacaactgctttgtgacgctttgcaaaatagaatcaaatctgagttttattttagatttttttaataagtatagttctgagatatatattttctcaattatagtcagaaaagttttttgttaatagttacactgttttaaggaatcatgccaaggtttgagatcaaaattgttcttttccaaaaactaagatgtctctcctaaatctccacctgatatcaccaacttgaagtcctaatgtccccatggggggtttccttccagactccgccaactgtgaattgcctttgttaaccccgtgcagcaaggctgtgatgagtcaagccttaaaagctaccttcagtggcttcaaaaaggaacagcggcgcctgggcattccaaagagtaagtactgctttcctgagcctgcactgggtgagaagaaccaacttcagtgcagttgtttgatcttgacttgtttattaagcttttgcttggggtattctgcaaagagtagcatggatgtcgttaacctgagccagtttctgtttcaccccaatcaacccaagacttgatccagaactcattaaatatgtagtagaaggacgcattactggtgtcttgaaatgtgcctgggtcgtgtcagaatggtgacgtgtcatcatggtatcttgctcattcgtgggttctggtgtatgtcggtacttggtgcataaattagggatgacagtggtctcactacctttccactgtttttacctcatgtgttccattttttcttctctcctggtagacccctggctgtggagtgagcaacaggtatgccagtggcttctctgggccaccaatgagttcagtctggtgaacgtgaatctgcagaggttcggcatgaatggccagatgctgtgtaaccttggcaaggaacgctttctggagctggcacctgactttgtgggtgacattctctgggaacatctggagcaaatgatcaaaggtaccagctgaacgtcttacttctccttgtccaggatgagctgtggccgggaagactgattgggaaagtcacgtgggtgttcttcaaccttagggttgccacttgaaatgacatagagtaccttgcctcaaaatgccactcaagtgagtcagatatatggcagtgattatagatttttatcccactttatgtgagtgtgtgtgtgtgtgtgtgtgtgtgtgtatagcatcaagtatagccacaaggtagtagccttagtcactaaattgtttgctattgctggctgtattcatcacgggagtccatgttgactcagatatgtaggacagcaagaattcccacgtcttctgagctcaccttacagagctaagagatatggcagccttaatgaaaggggggagcctttactcacataaaccctgtgaattctactgtaaattttcctacatccaaatggaatgtattttggatgttgaggattgttgagggggcggggtctgtttttaaacaagtgagaaattgatatatatttacacgctatcatattgtacagaaactggccattgatcagtagaaatctcaccaaatacagagaaagtcttgattcaaaacttaaaatagcagggagaccaatgtttaaaacatgttgagttaaaaaagaaaagagggccaggtgcggtggctcacacctgtaatcccagcactttgggaggcggaggcgggcagattacttgaggttaggagttcaagaccagcctagccaatatggtgaaaccctgtctctactaaaaatacaaaaaataaaaatattagctgggcatagtggcacatgcctgtaatcccagatactcggaagcctgaggcaggagaatcccttgagcccgggaggcagaggttgcagtgagtcgagatcacaccactgcactccagcctgtgggagtgagactctgttgaaaggaaggaaggaaggaaggaaggaaggaaggaaggaaggaaggaaggaaggaaggaaggaaggagaggaggaggagggagggagggagggagggagggagggagggagggagggagggagggaaagaaataaaatacagtagggattatttaggttaaaaaaatataagaaaataagcatgtttatagaattcagggaactagtcctcacctgactgattttaaacacactgaatttcagcatcaactgtagactcagaatctcgaaaacacctaggattcaacagctaactttttttagttacggcgtctgagggccagggaaactcatttttaaagaccctcatttcttctgaacttggacagggcttttctaccaagtttctggtgatctgtttattggcaaattgggcctgttttaccattcctcgggcctgtgagtttgtgtgtatttgggtttccgggtggacgtgcactttgtaatatattcgtagtaagtatgcatacacagtgcacaaaccttttccctttcaaagttcttgggcacatgtgttccccatcccagactcccacagccctggagacttcccacaccctggggaagcgtgcaggtttggaagcagtggaactgtaagcttcacgggggcagacaccatccattttattaatttcctgtatgcagcctctggtacagatggcatttcataaatacttaactgtttcttgaatgcatgaatgaattcaatacaccatctggaccttttgcgatagaaaatttagtgttgccaatgacatcattcattttggaaaatttattttagtaattggaaaaatgggttgctttctctcgttttttgaaaaagacaggcagggacgtggagcaccatgagattaaatgtgaagcactccgtgcatctcatcattctaaaattatcatctcacaggaattcagaaagtcaatttgttctgtgtagttttcacctacatctgccatcttacgtctcctgtgtctgcttttcagaaaaccaagaaaagacagaagatcaatatgaagaaaattcacacctcacctccgttcctcattggattaacagcaatacattaggtcagtccgattgattctgcccttaagaactttgtcttcagtcttcccagtagacttggaatctctctactgtaggctcctaaggggccacctagacctgtgtgtctcttatggtggccacacgtgggtgttgagctataagccattgaaatgtgactggtccacatcgagatgtgtaggaagagtatagtcatgcacaccagatttggaagtcttagtatgaaacagagaatataaaatgtctccctgataatttttaatgtattgattacatattgaaatgataattgctatatgaggccaagtaaaataagaaaattaacttcacctgtttctttttgcttttttaatatggccactagaactttcgcagttgcttaagtggctcacacgatcttccataggtcagcactgttagtgctagtccaggcaattcttagagcaaggagcagaacgaagtgagctgattaccgcagtcaccagtaatgttggtttagtgtagcaaacaagaggcggcaggcacagagtgcgtgaaaagcaatttgtaaactggctctgaacttgggagcttaaagagctgtcatggaatctgggtcctttcttctggttgctgatactggggagggcacagggtctggccaggccagcgagggaggggtcctcggaacagcaggcttgggtggtgttggtccggcccagtgttttctctctggccccagctccaccattcagacccggtgaagcccacctctctgccccactgggggcttcctgctcaggaggtctttctgaacatgacagtgggacaccctgtgcctgcctgaacctgaatcagagtcagagagcttccttccctctccagaaaataaattattctgcaatgaacagagacaggagcggtgtgatgaaggagcagaaagcagagtgggctgtgcctcagcacacagggttcatggcctggttctgcccttatgaatcacacagtacatgacacgtcacttggtctgtctgagccttactctcctcggaagctaaaagagccagtgagccctgtcttcctgaaggtcccatgaaagcactagggttgtagaaataggaacattgagtcctgcctgcagaggctgcagtcattttggcagagggctgctggttgagaagctgaatggtttgagaagaaggcctggtgacagacccccaccaaagcccgggtctccactgaggttctgcagagggctggagtgtgcggagtgctcacctgtcatttgctcgtaggggttagttactggggtaacactgactttaagagctctgccgtccgattgttctgttccaggttttggcacagagcaggcgccctatggaatgcagacacagaattaccccaaaggcggcctcctggacagcatgtgtccggcctccacacccagcgtactcagctctgagcaggagtttcagatgttccccaagtctcggctcagctccgtcagcgtcacctactgctctgtcagtcaggacttcccaggcagcaacttgaatttgctcaccaacaattctggtaagattggaagcatctttcaacaaggctgttgctttgattctgagaagcccagagccataatgaacctcttaataaatacttcctggattcagccattagagaagggggtcaaagcccatgttctaagtggatttccaacaagcatacccctaatatgtttcaggcactggcccaggtactgcaggcattgagtaaacaaaacagtccctgctcttacagccagatttctccacactttgggatatttatggaggcgatgcaggaatgtgacatttcttcttatggagatgtaacataaatacagtgcacaagtctcaggtcatgtggctggttggatttgtgtatgtatgtatacccatgtaataaccatccagatggagatagagaagtttccagtagcctggaagattccttcgtaccccttcccatcaataatgtccccccgacagaagggaacgattctgacttttatcattacggattaggttttgattttcttgaactttacatagatggaatcataaggcatgttttcttttgtgtttgtcttttactcatcatgtctgggattcatgcatgttgttggatgtagcagccatgtgttctttttcatcgctgtatagtattccattataagaattttattcattctactgttgatggaagataggatttgtgtagtatagttaccctaaggaataagcacctgagtagagagcattttgagaagtctgagtggttctacaccagcaggtgcatgattgcactggtagtggttggtgatgctatggtcgtgcccaagaccaactgtgtcctggaggaatcaaagtatgtgtttggttgtctttgccagggacgcccaaagaccacgactcccctgagaacggtgcggacagcttcgagagctcagactccctcctccagtcctggaacagccagtcgtccttgctggatgtgcaacgggttccttccttcgagagcttcgaagatgactgcagccagtctctctgcctcaataagccaaccatgtctttcaaggattacatccaagagaggagtgacccggtggagcaaggcaaaccagttatacctgcagctgtgctggccggcttcacaggtgtgtgtggaactccgagagcctggccgcccagtctcctgggtcctgtcccttgcttcctttcgagccacagtaccacattcaccgagggtgtttctaagctaggtacaccagtgctctacactccatgttttatgcgtggcttgctgtatctctgaattcgacaaaagccacacttggaggaattttcatgtacacagagctccatggaatgagtgaaaatcgacaggccactccctccacctgggacgttctgaggaatagttggagcaggggacatggcctgtgcagtcttcagccctgactcacccactccaagaatctcaaagaatgtaaactggcttagggaggggcagcagagccagtctcaaataatatgggcactgtttaccttttcttgcttctaaaatctatctgctcttatttttgaggtttgggtgagagctattctaggcagtggacaaatataaagctgtttttagaaacaggtatttccagtactttagcgaaaatactggggctttgttttcactgcttcgtgtatccttaaatgcgtttttgtttttgtttttttaaccatatggagccactgtggattgaaattacctaacttaaaaaaatctgataagtttaaaataaggatactgaggcattcattctttttctgtcatctaagaacaatcagccacgtaaacgtattaaaatacacggaaagagtgtgtgaaagccattatcggtttcattattgggagtttagggcctgagaagaataaacagccataacgttagtgtggttcattttaatagtaacataagtttctgtttattgactgccaactctgtagttaagtaggcatacagtctgtaggacagcctggcatgggggcggtatgaggccattttacagatggggaaattggctcacaggcagacagctatcggtgctcacacagctctggttctagaatgcctgtcccgtgctttacagcaaagctttattgataacggccattgcgtttctgaggaagagctatttggtagaaagaggttgggcttagggtcggaagatctaggctcttctcctgtttgctgtgatgggcgtgtgatccaggacaaggcacctggcctctgagccgcatcttatccctcctctttagaacagaaccacactgacacctgctttgcaaggtggtagttctaaatgtcaatcgaggacaggtggacgagaagctcttggcaaagcatgcttcaccagacagaggctgtgaggcaacgggtgtgaccccgcgtggctattgagtaaaccgggctcacattaagcaatttacacatggtcatttggcaggaaggtggcatgggatcccacgtatgacacgcctcattctgtgatgaaacaccccctcagccacccccatctctgccccactgggtgtttctagaaaaaaaccttgaaggtttttacataaggaacaattaaaccagatggggaattttaatgccaagagttggtggccctaaactttcttccagaaagaacaaacctagcaatcaaggggaagagtgtctcgcctagtgaccttattttctaggagtaggcagtgtggagcaggaactcacatttggtgccccgccccatcccgttaaagcacttagtactgtcaccaacaccttgagtgccaccctgagtgtaacatcggaaccccattcagagagttgggtctgcattcctaaatcagcatgtacaattaggatggttaaagacttgctgtattttacatctgtgaaagggtatgatccgtctccctccctctccccgcaggaagtggacctattcagctgtggcagtttctcctggagctgctatcagacaaatcctgccagtcattcatcagctggactggagacggatgggagtttaagctcgccgaccccgatgaggtatggccagagccctgggaaatctctgggcttgaaaacctgatttcctgcttgcattcaaaaactcagttctttgggcacaaaaaagggttcaccagtactgctgagaatctttccacgtgaggcatccttggctgttgggaaaatggaagtggagtcattgctttgttgataaacgtgtacagtgttttctgggtatgcttcatacaagggcgttgcacagatttcactgtcttgatcagttgtctgatcaagaggcccaagctgcaaactgaggttctctgccgaccatctgaaaatgccttaggaaggctgcccttgtccatcgggggaacaagcctcatgtggccccgagccagccttctgtccactccttagctgagcccagcagtgttgaccccagccctgcagagttagaaccaggagccctgtctaaaggagaaggccaagggcaggtgggataccaaccccgccagaaaagcgttagagagaagcccttggtctctggcactggggagcgtaatctgtcaccattcccaccccgcctccagttcccttgggagacaagcattgaggaatgagtatatcacacagctcagaatcccactcggcacctgttaacttcagtagttggaatatccagcctggagggtgggtgacaccacctttccctggtctcaggaccctcctggctctgaacccttggctcccaggaggtttcactgagctggggccagggagcagggacctcattccccagtggttctgccccttggggacacagtgcccctaccataggtactcaaaggtactcagaggtactcaaaaggtcctcctgcggaccttgtgtaggtgtcaagttctctctagagtgaacatgcctcagaatcataatcagggaggaatgtcattcactttttcttcattgacaaattgagtttaactcttttccatccatgttcaccaaaggtggcccgccggtggggaaagaggaaaaataagcccaagatgaactacgagaagctgagccggggcttacgctactattacgacaagaacatcatccacaagacgtcggggaagcgctacgtgtaccgcttcgtgtgcgacctccagaacttgctggggttcacgcccgaggaactgcacgccatcctgggcgtccagcccgacacggaggactgaggtcgccgggaccaccctgagccggccccaggctcgtggactgagtgggaagcccatcctgaccagctgctccgaggacccaggaaaggcaggattgaaaatgtccaggaaagtggccaagaagcagtggccttattgcatcccaaaccacgcctcttgaccaggctgcctcccttgtggcagcaacggcacagctaattctactcacagtgcttttaagtgaaaatggtcgagaaagaggcaccaggaagccgtcctggcgcctggcagtccgtgggacgggatggttctggctgtttgagattctcaaaggagcgagcatgtcgtggacacacacagactatttttagattttcttttgccttttgcaaccaggaacagcaaatgcaaaaactctttgagagggtaggagggtgggaaggaaacaaccatgtcatttcagaagttagtttgtatatattataataatcttataattgttctcagaatcccttaacagttgtatttaacagaaattgtatattgtaatttaaaataattatataactgtatttgaaataagaattcagacatctgaggttttatttcatttttcaatagcacatatggaattttgcaaagatttaatctgccaagggccgactaagagacgttgtaaagtatgtattattcacatttaatagacttacagggataaggcctgtggggggtaatccctgctttttgtgttttttttgtttgtttgtttgtttgtttttggggggttttcttgccttggttgtctggcaaggactttgtacatttgggagtttttatgagaaacttaaatgttattatctgggcttatatctggcctctgctttctcctttaattgtaaagtaaaagctataaagcagtatttttcttgacaaatggcatatgttttccacttctttgcatgcgtttaagtcagtttatacacaaaatggattttattttttagtttaactgtgtttctccgacagctcacctctctctgaccacccagccatttccttcctgtgctccacgttcttctgtgtgattaaaataagaatattatttttggaaatatgcaactccttttcagagatcaggagggatttatgtagcagctatttttactgcaaaagtaattcactggaaaaaaaatgtaatttgtaagaaagctttatttttatctcagctctatgtaaagttaaagttactgtacagagctgaaggacggggggcggtaggggtcttgatgaaacctcttgaacgaagcacagtttgtcccatctttgttcactcgtgtgtctcaaccatcttaatagcatgctgctcctttttgctcagtgtccacagcaagatgacgtgattcttattttcttggacacagactattctgaggcacagagcggggacttaagatgggaaagagaaagcatcggagccattcattcggagaaaacgttttgatcaaaatggagacttttgtagtcgtttcaaaagagcacctgagtcatgtgtattcccggcctttataaatgacccggtcaagttggtttcaaagtccgacaggcttgtctgtttactagctgcgtggccttggacgggtggctgacatctgtaaagaatcctcctgtgatgaaactgaggaatcgggtggccgggcaagctgggaagagcaaagccagagctgcgctgcctcaatacccacaaaagaccattcccagtatacataagcacaggatgtttttctcaagagggatgtatttatcacttggacatctgtttataatataaacagacatgtgactgggaacatcttgctgccaaaagaatcctaggcagtggctcattgtatgtgaggttgaaccacgtgaaattgccaatattaggctggcttttatctacaaagaaggagtttcatggggttcagcctaacagttatggaaactacagtccttataaaccattggcatggtaataaacagatcttaagtataaaaattttgtaattgggcctttactctctcaataataaagtattttgtttatataaattctttgtgatagtcctcgttcttcctctccacacccagcatgaaggagttggaggaaggatgttaaccccagatccattctctactcaaaacattccatcatcaagcggcaagtctctgtttaactggtttatacacaagtcacttagaaaccacaacccaaattggaatcaactttgagcccttcctaaaagaattcccaaaaagtgctctctttcaaaacaaaaaattcttttaagaaagtgttataatagaaagattcaaatgtctttctttgccagaagcttggcagagataacagaggagagattctggaatgtttatattaagtacattagaatttgaggtttaagtacttttggaactgaggccacaacactctgtcccctcagtggagtctgacattggtaaggtgatggtggtcttaggacacctgttttcaaatttgttctctttacatgctccaaaattagtgagtatgccaaaaagcttatattcattggtgcgctagagccagctcactgtgttctcccgagagctacatgtcccttcccatcatcgcatcagtaatggtagcttgagatggggcgtgatgagagtatttacaccatgggaatcagcagacactacaaatcagggccttctctcccccagagtgctgattgttaaacatttaccaacactctactggttatatctatcaataatttccatattagaaattaaagtaaattttaaaagaattcatttaaaaataattttacttattggcattaacagcatttttttcttgcaaaaagtaattattttttaaaaagttagcatggcattgtttcacatttgcaaatctctttaatgtctggtttagtattagagctggattcttctgtttctgcattcaatctgtttgcatatattttgatagagtatgtgaagaaaatccggcctaacagatatgtaacagaaacaaggaggagcatttaagactatttcagataattgtagatattctttctttactatgccaaaacttaacaaagtataattccttagttgcaattcaggtatgaaaccatattaataaactttcctaaggttacattaaattccattggcctaccttgcactttgaacagatcttttagccgtgtgtgattttgtaacatcctgcattggtcacttggaaaatattgcttcaaaatgttaacacatttcaaaatataatattcaacaattacattacttaatatcaccacaaatcacatcagaaaattactgggaaactatcaaactcacagtggtggatacacactttttaaaattcaaattttcacttgaaacctcaaattttataatcagcaacaaatacccctaagtatttgaggagagattctcggatgtttatactaactacattagaatttgaggtttaagtacttttggaactgaggccacaacactctgtcccctcagtggactctgacgttgttaaggtgatggtggtcttaggacacctgttttcaaatttgttctttttacatgcttcaaaattagtgagtacgccaaaaagcttatattcattggtgtgctagagccagctcactgcgttctcccaagagctacgtgtctcttcccaccattttgggggggaagcgacaggctcactttatttagtttttgaggaaggaccagccaaatacccaaatcagaataatttgccagttattctctcagataaaagtgatattcatgaatagagtggacagtttagcttgcaactcaaatacacaattgcatctccttacaacaatcaccatatttcagtatatgtgcagaccagttctttaagtgtactttccattttattacacagaaattaaaaagatgtgttttccattagtaaaaaataagtttttactgcttcatcaagagcattcttgaggccaggtgtggtggctcacacctgtaatcccaacacctggggaggctggggtgggcagatcacctgaggccaggagttcgagaccagcctagccaacgtgacaaaaccacatctctactaaaaatacaaaaatcagccagatgcggtggcacatgcctgtagtcccagctactttggaggctgaggttggagaatcacttggacctgggaggtggaggttgcagccagcccgggtgacagagcgagactctgtcttaaaaaaaaaaaaattcttgagtgaaactcttattttttcttttctctttttctgcaagtgcatggtggtggtggagagtgcagtgacacagtgactgccaactgttccggttcacgtgattctggttcagaaccatagtgcaaaaccacctgtgcttttataccatcatagcaaaggtcaaaaagtcaagcgtggatttgtattcttgtaaaaatagtcttaaccttgaggatccttctgaaagggtctcagagacctcagagtctgtggggcacattttgacaatcgttctagaaagaagagaggctcactcagagcaaaagtggtggacctctggaggacaaagcgaaggtagggaaaattagcctttggcctcccaaatccagtgtccgtgcttccagtcttctgaccttttcatagccaggtaaggaggaagcatttcttgtttaaatcaagaagaattgtctagtctgcatgataaagaaaagttccttcacacagggtgaaatggatactctcaaagcccttttcctgccatccttctatctttgttcttttccatgctccagtccaattccaaatctgtttcaggaaacaaaaaatgtatattttgccacttttttttgagacagggtcttgctttgttgccaaggctggagtttagtggcatgatcacagcccactgtaacctcaacctcctggactcaagtgatccacccatctcagcctcctgagtagctgggactacaggcatgcaccaccagacccatctgatttttaaatttcttgtagagatggggtctccctatgttgtctaggctggttttaaactcctaaaatcaagggatccttctgctttggcctcttaaagtgctgggattataggcatgagccactgcacctggtcttgccacagtttttctgaaacttagaagaaaagaggaaagggaagggaaataagtatttagagaaatcatttttcggaacatcttcaaaactgggattgtgcagagatgaggtcatggggcctgcctgcccgccttttccatggcggggaagaagcagaattacatttccgtcagttctgccccacatcctggctctcccccatgtcctggctctccccaacatcactcaaccagctttatttatttatttgtttatttatttatttatttattatactttaagttttagggtacatgtgcacattgtgcaggttagttacatacgtatacatgtgccatgctggtgtgctgcacccactaactcgtcatctagcattaggtatatctcccaatgctattcctcccccctccccccaccccacaacagtccccggagtgtgatgttccccttcctgtgtccatgtgttctcattggttcaattcccacctgtgagtgagaatatgcggtgtttggttttttgttcttgtgatagtttactgagaatgatgatttccaatttcatccatgtccctacaaaggacatgaactcatcattttttatggctgcatagtattccatggtgtatatgtgccacattttcttaatccagtctatcattgttggacatttgggttggttccaagtctttgctattgtgaataatgccgcaataaacatacatgtgcatgtgtctttatagcagcatgatttagagtcctttgggtatatacccagtaatgggatggctgggtcaaatggtatttctagttctagatccctgaggaatcgccacactgacttccacaatggttgaactagtttacagtcccaccaacagtgtaaaagtgttcctatttctccacatcctctccagcacctgttgtttcctgactttttaatgatggccattctaactggtgtgagatggtatctcattgtggttttgatttgcatttctctgatggccagtgatggtgagcattttttcatgtgttttttggctgcataaatgtcttcttttgagaagtgtctgttcatgtccttcgcccactttttgatggggttgtttgtttttttcttgtaaatttgtttgagttcattgtagattctggatattagccctttgtcagatgagtaggttgcgaaaattttctcccattctgtaggttgcctgttcactctgatggtagtttcttttgctgtgcagaagctctttagtttaattagatcccatttgtcaattttgtcttctgttgccattgcttttggtgttttagacatgaagtccttgcccatgcctatgtcctgaatggtaatgcctaggttttcttctagggtttttatggttttaggtctaacgtttaagtctaatccatcttgaattgatttttgtataaggtgtaaggaagggatccagtttcagctttctacatatggctagccagttttcccagcactatttattaaatagggaatcctttccccattgcttgtttttctcaggtttgtcaaagatcaggtagccgtaaaaaagagaattttagaccaatatccttgatgaacattgatgcaaaaatcctcagtaaaatactggcaaaccaaatccagcagcacatcaaaaaccttatccaccatgatcaagtgggcttcatccctgggatgcaaggctggttcaatatacgcaaatcaataaatgtaatccagcatataaacagagccaaagacaaaaaccacatgattatctcaatagatgcagaaaaggcctttgacaaaattcaacaacccttcatgctaaaaactctcaataaattaggtatcgatggaacatatttcaaaataataagagctatctatgacaaacccacagctaatatcatactgaatgggcaaaaactggaagcattccctttgaaaactggcacaagacagggatgccctctctcaccactcctattcaacatagtgttggaagttctggccagggcaattaggcaggagaaggaaataaagggtattcaattaggaaaagaggaagtcaaattgtccctgtttgcagatgacatgactgtatatccagaaaaccccattgtctcagcccaaaatctccttaagctgagaagcaacttcagcaaagtctcaggatacaaaatcaatgtgcaaaaatcacaagcattcctatacaccaacaacagacaaacagagagccaaatcatgagtgaactcccattcacaattgcttcaaagagaataaaatacctaggaatccaacttataagggatgtgaaggacctcttcaaggagaactacaaaccgctgctcaaagaaataaaagaggatacaaacaaatggaagaacattccatgctcatgggtaggaagaatcaatatcgtgaaaatggccatactgcccaaggtaatttacagattcaatgccatccccatcaagctaccaatgcctttcttcacagaattggaaaaacctactttaaagttcatatggaaccaaaaaagagcccgcatcaccaagtcaatcctaagccaaaagaacaaagctggaggcatcacactacctgacttcaaactatactacaaggctacagtaaccaaaacagcatgatactggtaccaaaacagagatatagatcaatggaacagaacagagccctcagaaataacaccctaccagctttctttcctgatagggctccagaactccacatggtggacacttgtcactgggaatgattcaggctttaatggggctgctgggcgggagcatagggcttgagggccagaggaagtggagcaggaactgtggcaagaggtagagggagcaagctgccccatcacctctcctgaaatatcaagcaagttaacaggaggatttgttgtgatttggagatggaccttggattatcactgtcactgggtctgtcaggcactgtttgtgaccttgggtatgcaatttaatcactctctgcctcagtttcccctccataaagccaggtcatttgtggctgttggggggattgatctattgggggtataagattgtgtaaagtcagtaacctgggatgggggtgctatttgaacagagcacgccaaggaaggtgtgtttgagccaggggatctgcaaagaaaatatggatcccagacaatcatgtctccattttcatcagaagaaatccaggggcagagttcagtgatgaaacaagtacttaactgaaccaagactcaaaccctggtcttctgttttctggtgttgtcctctggccaaaataaccctgtcatgtttggttgaagtcattataaatgctgccccagatgctacctagggctccttcaagtttctagttcctccttccacaaaccagaggccacagcccttgatttgaattttaaattatcaggaacctcctacccaaagaacacacagccctcatttacagcagctgctggcagctagctgagttcgaacagatgcaagaatctcataatctgggccagatattaatctgtcttttctgtaacagcaaaacagaagggtgagtcttgaagcagtgcagggggaaaccccttattgtgcaactcttttgtaactcctgggcggagtctggacatgtgacttctgcttgaaatttaacattaggggaaagaccatttttggtcatagctgaggtgatgacatcttggcaactggaatggacatgacctctgttccatgtactatgagtaactgccccctccccatttctcaaagtcatgttcagatggcaaaactgcctgggattaccacatctgactcttgctagctgtttctgtgtctatggcttcatactgtccagacatagacctggggctcagcacacatgtatgtttgagtggcataaggtcagaagcacagatccagcaaagactgtggcccggaggaaggtgggttggttggaggaaagaaagtggaggtgggagcaaacgaagataagtaaacaaaaaaatgagctcttaagcaaaaaagattgcctgtctgctgtagcctgtaaagctctgatgagaaacacctttatgatttgctggtaaactccacccaatttggttctggaagaggttatttttcattgcagtgcaagcatgtaattagttaattgggaaatatggcgccattttcaaagctcactttcatctgtcatctcacttacacctccctgtgaccctgggagattggttttattatgcccattttacagatgtggaaactgaagctcggagaggtgaaccccctaaaaagaaattggagaggcttatcctgactcatccgtggtccctgattccttgtgcctgagatgcagactgtggcttgggaataggggagggctcagagggctggagctcagctgagtggccggatgttccctcacagggtaccctcctttggcttcctgttgaccctagtagttgtcaatagtgctgcaggtgctccacgccttcccaccctctggatgaagctcatcctaaggaattagcatctcatttctaattctcaggtcctcaggaatcagacttgtattttgggtcaaatttgcataccttggggcttctgttttctcaagctatgtatggaccccagagcaaatcccaaccatggttcaatatcagcctctgggaatctgcagatcactggaagccaggctgcccacgctttctggaagccacttcctagtgaaggagccctggaggaaagaggcaatggtataggagtctccctaaagtgagaagtgtggagcccagcacttcaactatgtctgtgggtggagccaaaataaccagttgctcctgatcgctgcatgtcagcaattgtatcacaacaagaggccacagggcatcaccctacccaacactgtgatgggggccggggtcacatgtgcttaagtgtctctgtaaatcagcccttcagttgggattaagacagttcaggatcccaagaacacacatgcacacacacaacccacttgcacatacatgtgtgcagtcacacttccagagacacacatagacatacatatgtatacacacatgtgcgtgtgtgcacacaggtattcacatgcacacacacacgcacacttatacactaacacacatgtgcatatgtgcacgcatgcacacacacacacacaccccactccttttgcttgcttcaccttttctgtctctgctcctcctggtggtcatcacctcccatgccctgtctcctgtatcaatgccccaggactacctactataacaaagtgtcacaaagtgggtggtttaaagcaacagaaatgtatcctttcacagttctggaggctagaaatccaagatcatggtgtctataaggttggttccttttaagtgcagtgaggaaagagctggctccagccctctctcccattggctggtagatgatcatcttctccctgtgtctcttcatgtcactttccctccttgcccctctctgtgtccaaattccccctttttataaggataccagtcatattgtattagggccagatctaattatttcattttaactcaattacctctgtaagtaacctacctccaaagacagtgtcattttgaggttctgggggttaggacttcaacatatcaatttgagggcacacaatacagcccatatacacctcaacactaaataagttacatggtagttctatttttacttctttgagaaatcttcatcctgtttttcgtagtggctgcactgatttttacttccatcaaccgtgtgtccccgtcttttgatatgtgtgtatgtcatatgtcttcttttgataagtgtgtattcatgttttgaccactttttaatgggattattattatttgttgttgttttgactgttgactttgttgaggtttttgtatattctggatattagttccttgtccaaatgaatagtttgcagatattttctcccatccaaaagggcatctcttccctttgtagattgtttcctttgctgtgcagaagcattttagtttaatatagtctcatttctctatttctgtttttgttgcctgtgtttttgaggtcttagccataaattgttcgcctagcgcaatgtcctgaagtgtttttgctatgttttcttctaccagtttatgttttcaggtcttatgctcaagtttttaattcaccttgggttgatttgtgtacatggtaagagataaaggttcagtttcatgcatctatgtgtgagtatctaattttcccagcatcatttattgaagagggtgtctttttcccattgcatgctcttcattcttttatggaaaatcaattgactgcaagtatgtggatttatttttggtttgtctattccatcggactatgtgtctatttttatgccaataccatgctatttgggttaccaatagccttgtagtatattttaaagtcagatagtgtaatgcctttttcttttttctcagaattgctttggcctttcagactcttttatactgttttttctatttctgtgggaaaaaatgatgttggtattttgatagggatttcattgaatctgtagattactttgggcagtatggtcattttgattatattaattctttcaatccatgagcatgggatgtctttccatttgtttgtgttctctttcatttttttttcattagtatattattatttgtgcagtgagcagagcaaagtcagggacactgtttgtagaacctggctgcctcccctcccgcagcccagctgattgtcctggttgccaggcgcttgtttgcattagagacggaacactctgcagggttctgtatggtccattgtggcccttagg

SEQ ID NO: 833 - DNA, 3769 bp, Homo sapiens
ctcgtttcctcccctcccctccactcggccgtccctccttcctcctccctcctccctcctcctcccgctcctgaagagcgcgccgcgtgggggacggcccggttacttcctccagagactgacgagtgcggtgtcgctccagctcagagctcccggagccgcccggccagcgtccggcctccctgatcgtctctggccggcgccctcgccctcgcccggcgcgcaccgagcagccgcgggcgccgagcagccaccgtcccgaccaagcgccggccctgcccgcagcggcaggatgaatgatttcggaatcaagaatatggaccaggtagcccctgtggctaacagttacagagggacactcaagcgccagccagcctttgacacctttgatgggtccctgtttgctgtttttccttctctaaatgaagagcaaacactgcaagaagtgccaacaggcttggattccatttctcatgactccgccaactgtgaattgcctttgttaaccccgtgcagcaaggctgtgatgagtcaagccttaaaagctaccttcagtggcttcaaaaaggaacagcggcgcctgggcattccaaagaacccctggctgtggagtgagcaacaggtatgccagtggcttctctgggccaccaatgagttcagtctggtgaacgtgaatctgcagaggttcggcatgaatggccagatgctgtgtaaccttggcaaggaacgctttctggagctggcacctgactttgtgggtgacattctctgggaacatctggagcaaatgatcaaagaaaaccaagaaaagacagaagatcaatatgaagaaaattcacacctcacctccgttcctcattggattaacagcaatacattaggttttggcacagagcaggcgccctatggaatgcagacacagaattaccccaaaggcggcctcctggacagcatgtgtccggcctccacacccagcgtactcagctctgagcaggagtttcagatgttccccaagtctcggctcagctccgtcagcgtcacctactgctctgtcagtcaggacttcccaggcagcaacttgaatttgctcaccaacaattctgggacgcccaaagaccacgactcccctgagaacggtgcggacagcttcgagagctcagactccctcctccagtcctggaacagccagtcgtccttgctggatgtgcaacgggttccttccttcgagagcttcgaagatgactgcagccagtctctctgcctcaataagccaaccatgtctttcaaggattacatccaagagaggagtgacccggtggagcaaggcaaaccagttatacctgcagctgtgctggccggcttcacaggaagtggacctattcagctgtggcagtttctcctggagctgctatcagacaaatcctgccagtcattcatcagctggactggagacggatgggagtttaagctcgccgaccccgatgaggtggcccgccggtggggaaagaggaaaaataagcccaagatgaactacgagaagctgagccggggcttacgctactattacgacaagaacatcatccacaagacgtcggggaagcgctacgtgtaccgcttcgtgtgcgacctccagaacttgctggggttcacgcccgaggaactgcacgccatcctgggcgtccagcccgacacggaggactgaggtcgccgggaccaccctgagccggccccaggctcgtggactgagtgggaagcccatcctgaccagctgctccgaggacccaggaaaggcaggattgaaaatgtccaggaaagtggccaagaagcagtggccttattgcatcccaaaccacgcctcttgaccaggctgcctcccttgtggcagcaacggcacagctaattctactcacagtgcttttaagtgaaaatggtcgagaaagaggcaccaggaagccgtcctggcgcctggcagtccgtgggacgggatggttctggctgtttgagattctcaaaggagcgagcatgtcgtggacacacacagactatttttagattttcttttgccttttgcaaccaggaacagcaaatgcaaaaactctttgagagggtaggagggtgggaaggaaacaaccatgtcatttcagaagttagtttgtatatattataataatcttataattgttctcagaatcccttaacagttgtatttaacagaaattgtatattgtaatttaaaataattatataactgtatttgaaataagaattcagacatctgaggttttatttcatttttcaatagcacatatggaattttgcaaagatttaatctgccaagggccgactaagagacgttgtaaagtatgtattattcacatttaatagacttacagggataaggcctgtggggggtaatccctgctttttgtgttttttttgtttgtttgtttgtttgtttttggggggttttcttgccttggttgtctggcaaggactttgtacatttgggagtttttatgagaaacttaaatgttattatctgggcttatatctggcctctgctttctcctttaattgtaaagtaaaagctataaagcagtatttttcttgacaaatggcatatgttttccacttctttgcatgcgtttaagtcagtttatacacaaaatggattttattttttagtttaactgtgtttctccgacagctcacctctctctgaccacccagccatttccttcctgtgctccacgttcttctgtgtgattaaaataagaatattatttttggaaatatgcaactccttttcagagatcaggagggatttatgtagcagctatttttactgcaaaagtaattcactggaaaaaaaatgtaatttgtaagaaagctttatttttatctcagctctatgtaaagttaaagttactgtacagagctgaaggacggggggcggtaggggtcttgatgaaacctcttgaacgaagcacagtttgtcccatctttgttcactcgtgtgtctcaaccatcttaatagcatgctgctcctttttgctcagtgtccacagcaagatgacgtgattcttattttcttggacacagactattctgaggcacagagcggggacttaagatgggaaagagaaagcatcggagccattcattcggagaaaacgttttgatcaaaatggagacttttgtagtcgtttcaaaagagcacctgagtcatgtgtattcccggcctttataaatgacccggtcaagttggtttcaaagtccgacaggcttgtctgtttactagctgcgtggccttggacgggtggctgacatctgtaaagaatcctcctgtgatgaaactgaggaatcgggtggccgggcaagctgggaagagcaaagccagagctgcgctgcctcaatacccacaaaagaccattcccagtatacataagcacaggatgtttttctcaagagggatgtatttatcacttggacatctgtttataatataaacagacatgtgactgggaacatcttgctgccaaaagaatcctaggcagtggctcattgtatgtgaggttgaaccacgtgaaattgccaatattaggctggcttttatctacaaagaaggagtttcatggggttcagcctaacagttatggaaactacagtccttataaaccattggcatggtaataaacagatcttaagtataaaaattttgtaattgggcctttactctctcaataataaagtattttgtttatataaa

SEQ ID NO: 834 - protein, 469 aa, Homo sapiens
MNDFGIKNMDQVAPVANSYRGTLKRQPAFDTFDGSLFAVFPSLNEEQTLQEVPTGLDSISHDSANCELPLLTPCSKAVMSQALKATFSGFKKEQRRLGIPKNPWLWSEQQVCQWLLWATNEFSLVNVNLQRFGMNGQMLCNLGKERFLELAPDFVGDILWEHLEQMIKENQEKTEDQYEENSHLTSVPHWINSNTLGFGTEQAPYGMQTQNYPKGGLLDSMCPASTPSVLSSEQEFQMFPKSRLSSVSVTYCSVSQDFPGSNLNLLTNNSGTPKDHDSPENGADSFESSDSLLQSWNSQSSLLDVQRVPSFESFEDDCSQSLCLNKPTMSFKDYIQERSDPVEQGKPVIPAAVLAGFTGSGPIQLWQFLLELLSDKSCQSFISWTGDGWEFKLADPDEVARRWGKRKNKPKMNYEKLSRGLRYYYDKNIIHKTSGKRYVYRFVCDLQNLLGFTPEELHAILGVQPDTED

SEQ ID NO: 835 - DNA, 42952 bp, Mus musculus
  misc_feature (1)...(42952): n = A,T,C or G
tatatattgagatgctgtctcaaaaatgattaaaaaaaaaaagcaccagtgaaacacacatttttcttttctgagttagttggtcagacagacaggcagacacacacacagacatacacagacagacagacagacagacagacacacacacacacacacacacacacgcacacacacgcctttaagagttgcaacatgaaagagtcaagcccaacctttggatggttagttacttttgtgggttttgatcatttatcaatttcatacattacttagtttccagtctctggatattgcaaagtcttgccttgggggctggggcaagttgtgcctgtttgctttctttctgcctctactaagtgactgtaaagcattagactgtaattcagaggaagttgacaggtcatcatctctagctcccctgactattttttccagtgtttatttcttactaaagttttcataaaggcgtgcgccaccactgcccggccataaaatcttattagtaaaaaccgaccatgctcaagtagagaaaggatattatcagggaaatgcaaggcatttctggaataatccaggcactgactgccatttgggagaaatggtaccgttgaatctattctgggtgtattttgtaaggatgtgctggtaaagtcaaactagatacaaaagtgcggatgagtggaagaagaatgaagttttcagcaactggatggattatgtatgcatcttagaggagcctggctgcggggttatcagacaccttggacaagctggcatggaaaacgccttaggcatctggtagacagggtcaggctgctgagttcaccgtatggtgttcggagaagggccggggctgatatacacattatgggctcagcggcatttacgtgggcattgagcctttggaacgggatgactccatctatgtgatttgtgcagacagaaaacaagtccggtgtcacactccgccaaaaaaggctggcccgaaacgagttaactgttgtcaagaaaacaacaaaatcttaaagcactcatagtgaggtgggttgacaaagagccccacagccgagctgtgggtggaaaacaagtgaagcgtttcagaaggatgcagacgccccgcggggcgtgccagggttggaaggaaaagcaccagccgggtagcgaatgcttcggggttccgaagcaccgaggcttgggacccgttctcgctctctgcactttggaggtggagggggacactgatcagcgatcccaccggcggcgcatcctcccggatgggtgtgcgctgctcccgggcagggaggcgccggggggctacgttaccagctccgccgaggcaaggccaggtcggaggatagagcggacggagagaacccgcggcgccgggcctcggaaggggcctgtccagcggctccggggaggcggacgcgggctgatgagaccaccactgctgggggcggcggcggcgccaaggccgttacctgctccgcgctgctcccgcagctgcctccaccctggacttaaggaagcgcgggcgtcgccatggaaaccacgcggggcctcctgggatggctagttcgggtgtgcgcacgcgtagtacttggcactgtggaaaagccggcggaatggcagggttcggggcggggcaccagttgcgcgcatgcgtacttgggccaagggcgcctgggaggtctagatcgcagagaagctggaacccaggcggctgaaggaatttatagctgaccctgctttttgccgcagtgccaggaagggagaggactggggacagagtgtccctgttaacttggttttatacatggtggtgcttcttgcaaaaactaaatgcgagcacaaaaactgtgtttggtgtacagtatttccaagccaacaacaggctaagacactcaggtggtagaattatagctgttatttttgagtttgattgttaaaactggcatttttaattgtaaattctttgttgctaagaagggtaagaagctataatagctttattagtgtcatgcaaaacaaacaaacaaacaaacaaacaaacctcccaaaaccagggctctcacaggaagagtttatcctggaactaaatatgaatgaccgtggcctggaacacagatttatcttacctcaaatatcatgttccaacgtggtaaacgttttgtaaagttttaatagtcgcagaacaaataagtcacaaatcaagctacttgtaaagtatgtaagctgtgccgtcagataccaagcgggttacagcaaaacaggaaaatctacaggccccaagtgcttcaggtgggtggaagtgagggtctgtcggtgcttgcaaaagaatttacctgacggtcctgtaaatgttatatcaatcacgggcccatacagtggccagtccattaaggagactaaagataggccaaggtaatttggcttcaaacctgtcactttccatttagccacaattatgtaatctactaagctaatcagattttaggatctctaacaccggtgtggctttcttctgtgggatttcagtttcctgggtccatttctcttattttgtaatttctcttccccgcttaccttttgttttggcagcactagaggtggaacccagtaccttaggattttgatttttaatttccaccacatggtccatgctggcttctaatttaaggggttaagtgatccgcttaccccagcctctcacgtggcttggtctaccagggtgagcctggccttttagctcacttttaaacttggtataaatctttgtaaaacttgatttggaagaacttttgatgtatcaaaaccctgtgatatatgttataaatagttccttcaggttgctgaatacttttctatattttttacagtcagtgtctcactccatacatagaccaagctagccttgaactcatagaaatcagcctgtctctgtctcctgagtgctgggattaaaggtaaaccctaccataagttatcttttgtttttagagtatacagagacagatttctattaactctcttaagtactatgtttttttgagacaggatctcttatagtccagtttggcctcacaattgttatgtaatatgtgatatgtgcctttagccctagcactggaggcagaggcaggtggatttctgagttcgaggccagcttggtctacagagtgagttccaggacagccagggctacacagagaaaccctgtctggaaaaatgaaggaagcattgtatgatctttatgacctttaaatttttaattaaaatgtgtttttttattttttgaagatttctttttattttatgtgtataggtgttttatttgcatgtgtgtgtgtgtatgtgtataccatgtatgcagtgactgagaaggccagaagaaggcactggaactggagttaaagacagttcttagccgtcaagaaggtcctgggatttgcatctaggtcgtctgcaagagcagcaagtactctcagccaccaagccatcatctctccagcacctatttattttgagacaggctcttactatgtagctctagctcacctgacctcacagaccgggctagccttggcctcacagaccgggctagctttgaactgctcctcgatgcacagttactactttattattattatttaatatttttatcttttgctgggctttgtgatatgcacctttaaccctagcactggaggcagaggcagaggcaggcagatctctgagttcaaggccagcctggactaaaaaagttcgaggatagccacggttacacaaggaaatcctgtctcaaaacaaacaaactagaacacctaacaacaaaaccagaatatttttatgtaagctgatgattctgtatttgtatgtgatgtatcttgattatttttatcacccccccctccaggaacttgaattcttgatctccttttcctacctctcaaaatgttgtaaccacaggcctgtgtaccgctgtgttaattacttttcttttgctattgtgatggctgaagaaactccattttatgctaggcatctgtccatcttggtattcactagctttttgtctctttcctggaagataagttatcagcaatactgactcagtgaccttccaacccagaaatgtccagccgtgacgatatacttgctatgttacgagtaattgctttttggcttctgtaacctgcttatgcggttatgtggatgttcaaggactatttgaggttgccttgactacctagtcttggcagagcagaacagccagatttctgagtttgaggccaacctggtctacggagtgagttccaggacagccagggctacatagaaaaaccctgtctggaaaagtgaaggcagcactgtagacctccatttgtgtcatgtgaagagaaccaggccaacgtccccactctgagttggggccgtccagatcaaaggatggtttgtgccaagtacccagggagcccagccgccctgcatgcagggaattgtaacggactcagtcttgtacaggttttatgtggggaactacagttgtaacaatcgtcatatttagagacggtcttttatcccgacctgcaggacccacgggacctagttatttgggagattgagggggaccaagcctgaaagagaaacaggcgagaaaagggagcgagaccaagcaaaggcttatcaaggtctactttaatggaggctgggagcctgattataagcacacagtgagagaaaatagggaggggctgagggggaatgatcaaagcacagagagagggacggacatctggggcagatgctgggtgcaggcttgaaacatcttgtggcttatctttggatgctggttccgcccaaacagccccaggtgtctggccaagaccagggtcagttggttctcatgatcagccttgtgtgaaggagggggtggctcagctcccaacaaagggtcaattgattctcagggtgggagctgttcaggtctgctttcccacagtctggtctcccaaagccttttacagccatcctccttgatatattctctccttcctcttcactcacgttccctgagtcttggcaagatggctgatataaatgtcctgactatgttggagcacccccatttgctcatttcccacacttttaacagtgatgtgtctctgatttagccagtacacactataagaagctgttatatgatattaaaggatggggtgaccactggcaactaatgggaagggaagaggtagggacaggagggtggagagaaggagggtatggaattattaatctaaaccaaggatgtgtgaagtagtcttctgaaaccccattcattaataagctgattaaaaatataatctttaaaggagtttgaacagaagttctccacattaatgaccagtgctgcactttgaagacctgggttattaaaaccttagtgccaggggctggagagatgtctccgcggttaggagcactgactgttcttccagaggtcctgagttcaattactagcaaccacatggtagcttacaaccatctgtactggggtgtgatgccttcttctggtgtgtctgaagacagtgtactcatatacataaaataaatatttctcataaaagctctgcattacatttgtgataaatatatataaataaaacctcagtgctagacacaggttacctgcctatgacttattggtcagagacccaagaatctccccagacaaaacaggctactgctactgctcttgctgagttccagaagtcattggtaagactcacattcttgctgaagatatcttacacttcgtacataggaatcaatattggactgaccagaagactgggcactctgcttctggctagctttcatagttctggaaggtgtgtgcaggacgctgctggggaaaaagatgccagtggtccatgatgctacagtatgggtatgccaggcaagatgggctcagtggcagtagtggcaagactgtttatgaggtgacctggtcctcctgatgggatttgacacatgctccacaggaacgagttcagtgtgtgcttagagaagtcatgggccccaggggagaaattactgataatgtctctctaaacgatcatgttgtcaatctgccttctaaattatttatgtttgtttctatggatttatgctgcccaaagttaaattttgacttgtgaattagttgactttgagatatattctagggagtgtcctttctcatcatgacacctacctggggacagggaccaggctcaggatctctgagacactggtgaaaagagcaggtaccggagtcaaagaggtctcatgctgctccagagcaccagcctctctcctctgtgatgaataacagggtaggagagggtctggtaccagaaggaagtaaatgctcacggccttcgcccctaatgcctgtgatctgatttctcagtatgtgcgtgcctgtgtgtgtattcatgggtatacatgtatgtcaggagccataatgggacaagctaataactagcaggtgatcatcctgaagtggcctgcctcggattattatataatctgcgacaggtgggctctcattaagcaaggctgtgagggactcattttaggaaagattcctgctattaatatgcttttcctgtcattattaaatatatataacaaccactaagtagaagcacacccccttttgaagtagatctcagtagatccatgaagatgtactatcttttagtgatgctatgtagacaaatacatgacttaatgtgatcctataagaattcctaaaattatatctgtgattattaagctcttttataatggaactgctattaagtcctcttctgatagtcaaagcttcagtgagaactctgccagtctcccaagtgtcaccagtcaatccatggtaaccagactttctcctactcagagcacattccaagaggttgtaaaacaattaaccaaaggtcattaaaagacaactaacgatttattataggttctaggacagaagataaaatactgactgagtttatctatacaaaacttcactaataacttagttatggtttttaactctcagtgaacctgtggagctgagacaggtgatggatgtttagccagataattactcctaatggatatgcatgtagacatttgccgttgtaaacttctatttcaatttatgatttgattttttttgtgtgtgaacttgtgatgaactttgtaacatgtgatcatgtgttctgaaagatgtttaagagctgaggacaaagagaagagtcagaactgagggactggggtgagaggaacggaggtgagaagaactgagctgaggagaagtttttagacagaacatttttttagattagaaggagaatgcagagtggagtaacttagaaattataggtaacataaaatactaagagagcaatgtgcagaatgcagagggaaagaagatgttgcagagagcagaaggagcaagcaggcttctccttaccatgggatctgttctgaccccattgtaaggacaagacaggtttagtcttattaaaagaaataaagcttttttttttcttacacacatgggtttaattcatttagcattaaaaaggtagaagtttttttctttctctatgtaataaagattggagtacagttttcatccagaatgagtgagttctttctgcaccggtgcttggtcgtttgctccatattcatatttaagtatggatgtgtgtatgtgtgtatgtgtgtgtgtgtgtaggtatatgtgattgtgagaatgtatgtaagctgggcccagctgggtttgaatgaaaatgaataaatgaacatgaatgaagctgaatatgaatttatgtgagattatacatatttgcttatgtaaaagtttttccttctgagagtgttattctcttctcctggttcaatagaagtttattgctccaaacatccccctagtctgacaagcaagaggcatctggacaatagggagaaggctccagcaattaatcctttacttaatcacctgctgttttaggatgaggttctatgtgctagagacggaagtttctggcctcagaggatcagaggcaggtcagctacaactgtaactcagacttagataagtaaactttttattatacagcaacctttaattttttgtaagacaaagccttaccccagaaactcataagacaaagtcttaccctccacctatgctcttccccctctgctgcctcaagaagaaccaacaagaaagaagaaacagcccacagcctacgctatgtgtgtttatgtgtgtctgtctctgtgtgtgagtgtgtttgtgtatttttttccttccgccatatgtatatatgtgtgtgcatgtgtgtctgagtgtatgtgtgtgtatatatgtacatgggtgtgtctgtatgtctttgtgtatttgtgtgtatgtctgtatttgtgtgtgtgaacatgtgtgtgtatattcgtgcgtgtgcatatgtgtattcatgtatatgtatgtatgtatatatatatatgtgtgtgtgtgtgtgtgtgtgtgtgcatgtggctgtgtgtattagtatgcctgtgtttttactgtgtgtatacatatgtatgtgtgtgcatgtgtctgagtgtatgtgtgtgtattgtatttgtgtgcatgtgtgtgtctttgtgtattcatgtgtatatatgtgtgtgcatgtgattgtgtatgtgtgtatttgtgtgtgtgcatgtatgtatgtgcatatttatgtgtatatgtgtgtgcatgtgtctctgtatgagtgtgcatgtttttttattgtgtgcatatgtgtgcacacatgtgtgtttatgtgtgtctgtctctgtgtgtgagtgtgtttgtgtatttttttccttccgccataaagttctagggtatatatgtgtgcatgtgtgtctctgtgtgtgtgttgtgtgtatatgtgtgcacacatatgtgtgtctgtgtgtctgagtgtgtatgtgtgatttgctttttttcctttcactatgaagttctagggatgaaactcaggaaggtgttcgggcttgcaggccgttatccagtgagccacctcatgggtccttgaccttgctttgaaacccatcagcagagtctgggctgctaacatttgggctttttttttttttttttttttttactagttttgtactctgattttttttaaatgcagttcaaatcacctgtataaataagatgctttagagcttgttataaacatccccatctcccaaagcctttaaaatagggagattatttctagatacagtcatcggcagccaccagctctgaagtgtcagtgaagttttacagcacccaacagctggtggaaggagaaagcaggaaacaggccactcacagaggaatctccatcctgtgacagttcgttgggtttttaaataaccctctagaaaactttaaatcaggaagccgcgcttcatttaagtggccagtgcggctgtttcagtcttcacagttctgtggtctgtccaaggcctggtgaatccagcctggttctggataaggtgactttttctgggcttttccctaggctctggacaactcgcttcttttccacaccccacagtttccagagccccgcctcttctgccctaggcacctctccatgggtctgtgattggtgcgctcccgagctctcagcctggccttttagggactgttgttaggcctttaaagtgataagggaaagggtccagtggctgcttttatcagccaatcgttttcctgacatcccaaacggagggggaagcccgggatgcctccccgttgctctttagcctcttggttggaggggagggctgggagcagaggcttggatcaccgccagccctgacctggcacctgctcccccgggcgtcactgcgggatttgtccagcgacttccctagcaggggtgtgttagggggagtcctctttccgactgtcgaaatggttatcaaagtgtttgttgccacatcttctgggtccatagcggtaggtgtctggggctctgtgggctttcttcctatgtgtttttctggataactcctggttggaggcagaaggagtgggtatgccccggcttttggccttgaatgctgtttttgtttttgtgtgggagtcaactgcacactgcggtgagcatgagcgccctgcgcttttttgcctctgtcttcgtgatgttggaaaaagtatgtgagtgtgtaatctggcaggttggcgtgaaaggtgactggacggggggagtgtttcatgctccttttaaccggtgttttgtgcgctgttggtagtgctgtgtagttttagccatttggaatttttagtgctttatcattcattctgtaagacgcaggctaaatcttggagacagatgacgggtcagggagagatgaatcagatcgtccaaacgacctcggggcacaattactcctatatttgaaatagctggaaacattagaagatagtaggtatgagcttattatttgtagaaaatgatgtcacaatgacagcagcaaacccatctgaggcccacagttttaaatgctctcctatgtgagggcacctagagtgtgagctaaaagcccagctccatatggcttagctcggattgcttgagaccacccactctctgattccagcctgcatttatgtagacccgctggtagaagaaataagagcaatttagagactcagttctaggtctaggaatgaattgtaggagactggcttcaggtggactctagtgtctgtcttgtgaaggttctagtcagtacttagcagaaatgaggaaggctgtgggaagaaaacagtctattaattccaagagttagagaccagagagggggctgtttcctttaatagctgttccgaagggtctcaggttgcggctggaattctgacagtcactccgcagagatgtttccaggccctggctaagtaccagccccaaccacaatttgctgaaggccactacacccaaccgcggacaatcaggaggatcttcagagaaggcaggcagaaaataaaagagtttggcaaccccacccactcgtccaggatggtttctgtggttctatttgttgtgtagtatgtagactaactcagacttggaaattatgacatcatgtggccctgaactgatcgatgccctggactaggagaaaaagaggagcacacagctcgagtggagaattccaatcacagagattgagaacacagaacttccgtggctgttgatgggtttacataaggagcacacccatgtttcttcagtgctggctgggttcacacctggggcctcacccttgctgtgtaagcatgttaacttaccactgtgctgcatcctgggagttcgcgcttgggtcttttagattggaaataaattttcaaggataggtgatctgatgggctggttttgaagtgggtttcaaacattagtgctcagtgttgaaaacttttcacagtcacttacttacttttagttttaggtgcatggatattttgcatacatatatgttactatatcacacatatgcctgatgcacatagaggccagaagaggtgtcagatcccctgggactggagtaacagatggttgtgagccaccactatgtgggtgctgggaattaaaaccaggtcctctgcaagagcagccagtactcctgagccacctctccagcctaagtcttttatctgttctatatggctgtttgtattcttcagacaatggaaataaacccacagatttctttggtttgtttattgtttattgtcctgcatttttgaagtctgggagtttgttttagccttggagactctggtgggggtggggtggggtgtctcccttcactctggaccttggaattcaaccctctagatgaatatttcagtgccatttgaaactgtgtgaccttggaggtgtttgtcctttctaaacctcaatttccttgtctgtaaaatgaggataagaatagtgttcacctcatagcttggtcatgaggacttctgagataccacactcgggtgcccatcacagtgccagggcctgtccaggcactggaaagttctgtgattattaattatagtcactggcagctgtttgttaatgttagttgccattttaatctctactagccaccatgaattaattattgatgatatgtattaatgagcatttttactgtggcgattagcaactatttttttagtagaaccaaggcaatggtcattacattttgaaaggactgtctaaaaccttgtaagtggaagagtttcttccataaagatgaggtcatgcaaggtggtggtggcacacccaggaggcagaggcagaggcagaggcagaggcagaggcagaggcagaggcagaggcagaggcagaggcagaggcagaggcagaggcagaggcagaggcagaggcagaggcagaggcagaggcagaggcagaggcagaggcagaggcagaggcaggtggacctctgtgagttcgaggccagcctggcctacaggacagccaggactacatggagaaatcctgtctcaaaaaaaccaaaccccctcaaaaaaagaatgagaactcagtaccccacatcttaccgttgagtgttcaggaatgaggaatttcacccaacagcttcttgacaggaaaaaccacacagtggctgcttgagtctctgctacacatgtgttggtggtctgctttgggggtccacaaagatcagacaggtttagaaaatgagttctgggccaacaaaaacaagcccataatctcatcaggacctgaatgtatgaattggccccattttaacaattgcatttaaagatctgggccacactatgttgaggagggttttggcctaagaggctgtggaaagtaggagagggcagatgtcttctctagggcccgcttctcgagaagccttcccctgcagtggggtagcagtgcaaagaggggaagggggagagtctttactgttttcaaggtgttcaatcccctgcagtagccactcttaaggcaaagactcacagggccttccaggtttctcagtctgctctcccactggattgatgaaataaatgtgatgggaaaagtgggcctctgtgtgagtgtatatgttagtgagcatgtgtgcatgtgcctgtacacacatgcagagaccagaggagggtgttcagtgctccaatttatcattatccaccttgttcacttgagacaatctcttactgagcctggaactaggctagtagcctgtaggtcccacaatcctcctttctcttctccgccaacagattgtggttacaggtgtgcctgtggtgaccggattgtggctacaggtatgcatgtgtgaacctgtggttacaggtgtgcctgtggtgaccagattgtggctacaggcatgtatgtggtgaccagattgtggctacaggtatgcatgtgtgaacctgtggttacaggtgtgcctgtggtgaccagattgtggctacaggcatgtatgtggtgaccagattgtggctacaggcatgtatgtggtgaccagattgtggctacaggtatgtatgtgtgaacctgtggttacaggtgtgcctgtggtgaccagattgtggctacaggcatgtatgtgtgaacctgtggttacaggtgtgcctgtggtgaccagattgtggctacaggcatgtatgtgtgaacctgtggttacaggtgtgcctgtggtgaccagattgtggctacaggcatgtatgtggtgaccagattgtggctacaggcatgtatgtatgaacctgtggttacaggtgtgcctgtggtgaccagattgtggctacaggcatgtatgtggtgaccagattgtggctacaggtatgcatgtgtgaacctgtggttacaggtgtgcctgtggtgaccagattgtggctacaggcatgtatgtgtgaacctgtggttacaggtgtgcctgtggtgaccagattgtggctacaggcatgtatgtgtgaacctgtggttacaggtgtgcctgtggtgaccagattgtggctacaggcatgtatgtggtgaccagattgtggctacaggtatgcatgtgtgaacctgtggttacaggtgtgcatgtggcaacacccagatttttatatagcttttttttggatctgaattcatgtctgtgcgcaagcacttttatgtgttgagctctctccacccttacaaattttctagtttggtctttctctctatccctaaaaaatctgttttgtctgggtgtcattcttggaaaacccaccaattcaacggaaactcactgttgttactttaaaatacggatcagaccaggtatctggcagaccaggcatgatggcacacacttggaattccagcactcaggaggctgaagcaggatttgaggtcatcctgggctacatagctagttctaggccaacttggactgtgtagtaagaccctgtctcaagtaaaacaaaaccccacctgatggcatggccatcccaactggaaagaggatgggtgcctggcagtgcaggttaccacggtgacacaggacatgttaccacagtgacacagaacatggtaccatggatcatctcactcacttgcccacggacatgagcaccccagaggaggatatctggtgtctgtcttgcagatgagggaattgaagccgtaagaccttgctcatagagcgtccttggagctaggacacatatgtcatccacaactcccatccagcaggcttcacactgcagtttggtgacctcagttggaaagtctcctcactgtaccagacaatagacaagaggtgtcaagcgaagggctgggagaggcgtggctatagattcccagacacgctggagtggccaacggttcctgggtgacttcaggacagagacagagcttacttgtgggcaaatgccacaggataaacagctctccttatctccactgagatatccaagtctccaaactgtgaccccctccgtgggagagagagagagagnnnnnnnnnnnnnnnnnnnnnnnnnnnnnnnnnnnnnnnnnnnnnnnnnnnnnnnnnnnnnnnnnnnnnnnnnnagagagagagagagagagagagagagagagagagagagagagagagagaaagagaaagagagagcgcaaactaatgtcttttaagggatggaaagagctcagcacgataacatgagttcagacctgcagacctgctccttaggaaacagcagggcccttggcattctgaggatagagaagggacccggggaagatgtgagtctggaggagatctgctgggggtgcctgtaaccctcttcctgtcataaaggggaggaggcctctgaaggcttatattggtgggtgagggggtgaggggacccaccagagaggaaaggcattgtcccctccttcctcctctgggtttgactttaggactctttcttctcccaatctcccaggccaggtgcccctcacttgttccagtctggctaaggagactgttttaagtgccccttggtgagtccaagggcaaacagatttcttctgtttcctttgggggggggcaggtgctgagaacaacacctagtatagtgtcagcacccacttgtacgctgtcacccctctgccgatcctttctgatgggaaggtgtggtttttgttttctctgttttaatgctgtccacggttatttgtgctggagagtacacagtgaaaggaaaagaccaaagtcgtgtccatgtcaacaaagcatgcttcaaagggggctataacaccacacagtgcatcgatggccatttttctctgctcttaaccagattaggaaaaaacagcaagaagtggtgggctttttggaagccaataaaatagacttcaaggagctggacatagctggggatgaagacaacagaaagtggatgagagagaatgttcccggggagaagaaacctcagaatgggatccctttgccccctcagatcttcaatgaagagcagtattgtggggtgagtattcagtgttgtggcaaattcctctctgtgcagtcatcagaactaactaattagttaatgtgtgtggtttgcatgtgtgcgtgcccgtgtgtgtgtgtgagagagagagagtctgtgtgtgtgtatgtgtgtgtgtgtgtgtgtgtaagagagacagagagtctgtgcgtgtgtgtgcccgtgagagagagagtctgtgtgtgtgtgtatgtgtgtgtgtgtaagagagagagacagagagtctgtgcgtgtgtgagagtgtgtgtgtgtgtgtgtgagagagagagtctgtgtgtgtgtgtatgtgtgtgtgtgtgtgtgtgtaagagagagagacagagagtctgtgcgtgtgtgagtgtgtgtgtgtgcccgtgtgtgtgtgtgcctgtgtgagagagagaaagagaaagagaaagagagaaagtgagaaagagagagagtcagtgtgtgtgtgagagtgtgtgtgtgtgtgcctgtgtgtgtgtgagagtctgtgtgtgtgtgtgtgagagagagagagtgtgtgtgtgagtgtgtgtgtgtaagagagagagacagagtctgtgtgtgtgagcctgtgtgtgtgtgcccgtgtgtgtgtgcctgtgtgaaagagagagaaagagagaaagagagagtcagtgtgtgtgagagagtgtgtgagtgagtgtgtgtgagagtgtgtgtgagtgcctgtgtgtgtgtgtgtgagannnnnnnnnnnnnnnnnnnnnnnnnnnnnnnnnnnnnnnnnnnnnnnnnnnnnnnnnnnnnnnnnnnnnnnnnnnnnnnnnnnnnnnnnnnnnnnnnnnnnnnnnnnnnnnnnnnnnnnnnnnnnnnnnnnnnnnnnnnnnnnnnnnnnnnnnnnnnnnnnnnnnnnnnnnnnnnnnnnnnnnnnnnnnnnnnnnnnnnnnnnnnnnnnnnnnnnnnnnnnnnnnnnnnnnnnnnnnnnnnnnnnnnnnnnnnnnnnnnnnnnnnnnnnnnnnnnnnnnnnnnnnnnnnnnnnncactatgttaacacacacgagtgcgcgcgcgcgcacacacacacacacacacacactctctctctctctctctctctctctctgcttctacatgggtgctggtgacctgaactcagggccttgtgcttgcatggcaagcactgtatcaacagatgcatcttgtcagtctgtcagaaaccatttaacgcagattagctttgagacattgcttggagtcgtttataaataaacacttgagagttagaagagggtgaagtcagtggaatgatgattcagaggattcgagtgtgttttaggtcctttatttggaagaatagaggttacttgtactttaggaagaaagggattgattccagttagccttgtgaagtgcatactcagtggatacttgataaattcttaaagactggctagtgacgtgtagtcttatgccagaaacaagatgaatttgttcatacttacacagttactttaaatgtgttctaggaattttgacaataatggaagttttatttatatttactctttttttatctcatttaaatttacccccaccccccatgtatgtatgggtgtgtgcaagccatggcatatgggtgtggaactcagagggaatttttgggagttgttctctttctcctacaggttctggggatggagctaatgttatgcttggcagaccttacacactggcctgacaacttgattttaagccctttacatttatttcagcatgaagccacttaccttggagtttacaggtgttgctaaataaagcacatcactgaaagaaacattaaaagatcagtggactttcggtagggggagtggttgtaccatacaagtccttcttcctactgggggttggaggagggtgctgccaagcggagggagtcgtctggtgtgagctgcatctgagagctggcccagtgcagaacatacaagcgttcctttctcctgtcacaagagctgactgtgctttttgtctgaacttcctgttttcaagcagacgcaggctaaagctgctgtcctcacccaaacacattagccaaatgctcggaaccaagattatacaagctacacggccaagcatactgtgtgtgtgtgagagtgtgtgagtgtgtgactgtgtgtgtgcatggtggtgtgtgtgagtgtgttttgtgtgtgtgcatggtgtgtatgtgtgtgcatggtatgtggtgtatgtgtgagagtgtgtgcgtgtgcatgatgtgtgtgtgtgtgcatggtgtgtgtgcatggtgtgtttgtgtgaaactgtatgattgtgtatatgtgtgtgtgcatggtgtgtatgtgtgtgtacatagtgtgtgtgcgtgtgttcttgagtgggtgtggttgggtccccacatatggaagtcgaggacaaccttgggttttgctcctcaagcactttctaccttgctttcttgagatggggtctcctattggcatggaacttgcccaggctaagctggcaggctggtaggtgccagggatcctcctgtctctgcctcttgggtgctgaggtcataagtgtgcactgctgttctgttgtgtctggccagcagttcacatgtctgggttctgttctgggaaggcattttggaatctggaagagaagagggagctaggccacgtgagagaaatatgaaaccaagacagtcattctgatcaaggttcaattttaatgtcaacaaacacactttataaagaagagaggaggcccatctctagccatgcaaagtttctttgaagtagataggtcagccttttagtgggaagataacaattcggtgctaactccggaaaatcttggaagagaaccggtttggttcggcctcaggctggttgggcctctggcaggtagtggcacatcaaaggagcagcatagcaggtggcttcgcttaagctaagcaggaaggaggtaacactgttcttagattttttttttttttctttttaaaacatgggctctggggaaggaactctgaaatggaaacttaagggttctttggaaagtccgttggatggtgttttgctgaggcaaacacgtgaaggaatgtttaaagtggatacgggtgtgaaaggctaaggcagactcgtgaaggaacgttttgaagaagcagacacaggagagaggatgttctgctaaagcaagcatgtgaaagaacacatgatgagagattctttgctaacaacatgcatgtattgctctgcattacattcagctgcatttgtcgggactccatagagagaaatgcaccaaaaacttatgttggtgtgctgcagtttgttgccgcctcggggctgatttgaaacacgtgctgaagcaagacccatgctgaggcaaggcacgtggaggacatgtgatgtttggagggtataaataggattccgcagagtgcgggagacagcttggcctgctagtcgtacagctaactgtgcaacacttgtgtgggcgttttccctgatctttgcttccctgagagaaacacagctgagaacttttcctggggtttctgttggtctctcctgcatatgcgagctcaggttgaggtctggctgtctctgctaggttgtgtcaccactgttgctaacccaattctaaagaactggactgctggtgtatcagcaaggtgcttgcagtggatggagctgcctctgcctgctaacctatgaactgaactgctgatttccagacaacacagacaggagttgctacaaagaagctttctggataggtccactcccctagccccaacccatcctttctttcccactacctctggtgggtggtgggctacactgaaggttaaaagctgttaacaatcatcactaaaaataggatttgaaaacaattaaagttaagaactcagatcctcatgcctgcaagacaaactttattgagacgtcattgtctccgactcactgtctgctctttaacacaaaagtttttgagcctctgactggaagtatgaattattgcttgttaggggcttagcttacttgctttgagcttctctagcaaactgccacagactttgtggtttaaattaacagatatttatcctgtcacagttccagaggccataatggtgctggtgaatgcttgaaagtttttggaagctcttaaggagagcctatgccattcccttctcttggttgctcaggatagcccttggcttgtagaagtatcaaccagacatggcctcaggggctctccctgtgtataccagtgtctccgaagggccttcctgtaaggataacagtcattgaaaaagactcgctctaattttagtatgttcttctaacaggtacagctgcaaatatcttacttccaaataaggtcactttctgaggttccaagtggacatgggcttgtgtgtgaagcactggaactgactgcatgaatccacaaggccagattagcttctttagaggtttagctaacagtcccgtggacgggggagtgctttcggcttcagtgtcctcagttcctgttgtgggggcgtatggtctatttcaagtcacccctacccccatgaattgtacttggggctttccagagcatagaaagaatttcctctgcgaagaaagtccttctccatccactgaggtggctaatgtaaggtactcactgccatgcctggcaacctgagtgctatcctttgatcctattgctcccaaaagttgtctgttgacctccacacatgctctgtggcacgtgtacacccccacagtaaataaatataatcaaaataataatagaccagagaacttattcttctctaccctcccccgacatgtcctgtgcagggtaatgcaggagggagctatggtgacaaggaatttttctgcaatagactctttataaaataaagtaatgtggtgtgtatgtgtgtgcatggtatgtggtgtgtgtttgtgtgagtggtatgtgtgcatagtgtgtggtgtgtttgtgcatgtgcatggtgtatgacgtgtgatgtgtgtgtgtggtatgtatgtgtgtgtgcatggtgtgtgtttgtgtgtgtgcatggtgtgtgtgtgttgtgtgagcctggtacatatgtgtgtgtatagtgtgtggtgtgtgtgtgtgtgtgcatgcatgatgtatatgtatgtgtagggtgtgtgagtcggttggatggcgttttgctgaggcaaacatgtgaagaaatgttttgttaaagtatgtgtatatgttcatgtgtgtgtgtgtgtgtacctgtgcatttgtgcttgtgtgaagttcccacagaggctaaaagaaggcatcagatctcttggagctagaattgcaggtgggtgtggaccacccgatgtgggtactgggagctgagtgcaagacctctgcgagagcagcaaacactcttaactgctgagacactgctctggcaccccagtctcttttaatattagaaaaattaaaaaaattcatactcgcacacattgagagattaaataatctcaaagggttttcaatatgaagccgtctcacctcaattcctccttatagttttagttacagtcccctgagctagctttccaggctctcacagggcctctggctcagaagggctctctacttggtctaattctctgatactcttagtttccagctatgtttaaaccaagggcctggcgagtctactttactctggcctcaaacactaagcaactagtcctgctgggaagcaaccagtgttggcaacttcctgtttgaaatgtattctatggctctttgttgtctctaaatagggatgagcctggtgccagagagtgacatcgagctcactgcataaccttttctattattatattttaagagatcatttgtcaacactgctttttgaaacctttaaagactagggtggctggagagatggctcagcagttaagagcacttgctgttcttgcaaagcacctggatttggttcccagcacctacatggtagttcacgacgggccgcaaatccagctccaggggatctgacaccctcttctggcctctgcaggcagtaggcatgcacatatatgtacatatatacatacagtcaaaaaactcgtgaagtaaaaatcaaatggcatgaactaaagagtctgtgctggctacttttatgtcaaccggactcaggttagagtcatgcaggaagagggaacttcagttaagaaaaggctcccaccagaatggtctgtgggcaagcctgcgatgcattttcttgattgatgacagatgtggtagggccacacccaggcaggtggccctggtgctatagaaagctgagcaagccattgagaacaagccagtaagcagcactcctccatggcttctgcatctgcccctgactccagttttctgctacactcgagttcctgccctgactttcctctaacagactgaaagtataggccaaaataaaccctttcctccccaactagcttttggtcatggtgttttatcacagcaatagaaactctaagataccattgctatatgcttccccatgagtagaatacagactaaaaatagcagccattcaagtgttcttagtggttcatgctctcggtcagtcacaccctgggcccgatgacagcaccaggcatgggacagcgggggcaaacagtagatgtctctacaccaggaggtggggtcatcaggtgcttgggagtcctgagcatctgctgtgcagagcagaggaggatatgcagagattcatggcagacaactatcagagaaaggcaacactgggtgggaagccaggtatagtcaaggccagcttacccgcccaagagggaatcactgttggaaatagcagacttgtctatcgatgatgagttgaaccgggctgtggtgactacctgaggactaaggcagcttgggcttgggaagaaccaaagaagactggaccattagcatctttataatatagatgtgagtgtccctggtactcagggaagtggaagaggacagaatacaaacccagtagggcaaggaaaaggcttctctgcatcttgtcattccaggctctatatacctgtccctgattacatacctccctctgtgcatctgccccagatcacagccctccctccaggctctgtggacctgctcctggtcacatcctccctccgaagcctttcctctgtctcccacacgtatgtgtgtgttcttatgctatgtaggtacaacaacaacgtataagacaagcatacaaccaatgtctttactttatagctgtatggtttagctatcagttgacaaagcaaactgagaggatgttttgttcttaatggtggatagaaaggaactgggcttgtggcttattctagctcccaagtgtataatggatttaaatattctctttctttgctttaaggactttgactccttcttctcggcaaaagaagaaaatattatttattcattccttggtctggctccccctcctgggtcaaaggtaagcttgcaccatggatggtctagtacaggctataacaacagaagatagaactggcaaagagcaatgctcatcagtggtattctaggacaacatgacttttattgtttaacttacagaatgcttcatgaatttacatgtcacccttctacgggtgctctcttatctctataccattttaatgtatgtgtgtgtgcgcatgagtgtgtgggtgtgcatgtatgcattgggtgcaggtatgcatgtatgcatgtatgtgcatgagtgtgtgtgcatgggtgcatgtgtgagtgtgtgcgtatgtaatgtttgtgtgtgtatacctgtgcatgtgtgtgtgcatgaatgtgtgtgattttgtgcttgtgtaatgtttgtgtgcatttgtgtgtgtatctatgcatatgtgcatatgtgtgcatgagtgtgcatgagtgtgtgtgtgtgtgtgtgtgtgtgtgtatgttgcttcagcactgacatgatttttaatataatcttcattgaggaactgtgtgcgtagagataatacaaatgtttcaccagacaattttccagttttgctttcattcttgttctagtaaattttataatatttaataaatgtgaatgttggggttaagctggggaggggcacacagatcaatgcaattgcttagaaggaggccttgggttcagtttccagccttgaaaaagatgaataaaacagggagaaagtgttgcatctttgtgttgggttatctaagtctgtttgtgaggggcataggaactacttgtgcgactcctccgttatgtcaccataatgacttcacatctagctcccaaaaattcgcttggcaaatgacatctgctctcagcttagtaatttctacttactatgagtttgctttttgttctggtaagaagtggaaagaaagatctagaatcaagcaccatgtggatttcatcagtgtccccttagtgttgactcctctttgattatgtataatccatgcagatgctgacaaagcttagttgtttcacgtgaacatctgcttcattctcctcacagaagcagagtctctcatataccacactctactgacatgagaatacactgtgaaatttactcatttaaaaaaattttttttcccttggggctggaaagatggctcagtggttaagagcactgtttgctctcacagagaacccaggttcagtaccagcatccacacggcagctcacatccatctctaactccaattctaggagatccaagtccctagactggcctctgtgggcagcaggcatgcacatggtacacagacatacatgcaggcaaaacacctactgacacacacacaacacgcatgagtctctaatttgtgctcagattgattctaaaagagatttgtatgaataagtctaaattaattctttttttaaacatttatttattttgtgtatgtgagtatgctccagaagatggcattagattccattacaggtggctgtgatctacctaccatgtagttgctgggaattgaactcaggacctctggaagagcagccagtgctcttaaccactgagccatctttccagccctctaaattagttgttaatttaggacaagaaactcaaacctgcacctcacagacaggtttgcagagtgcacccgtgtgcttgtccctgtgccagccttcgtaggcactggaggtgtctcagtgtgcaagccactttgcaccctgcactaatgctttcttcaaatggtactatatagagattttgagatcagttaatacttgtataggaggacaaaaaactcccccaaaccaaaccaaacccaannnnnnnnnnnnnnnnnnnntcccccaaaccaaaccaaacccaaaccccaaacccaaataaatccactttctttttaatgaaatgacatttgctttgttaaactgcagtatatcccaaacactagcgctgaatgaagactattatgtgcaatttaggattttaatttggcataagacccactcaatgggatcactttagtttatacattacatggaggagatagtggaaggggctgtgaaggtagtttgctgggtaaagcactggctacacaaatatgacaacctgagtctgttcccaagtgtctacgtaaaaatgtcagctgtgggtgtgatgggaagacaggtaaattctagttaatgggtgagattcaggttcagtgagagtccaagtctcaaaagaaaggaaggacagaaggaagaaaagaagaaagaaaataaagaaaagtgattgagacattgacctcatgcctctatatgggcacacacacacacacacacacacacacacggatacatgcaacacacacacaggcactcacatatagacatacacacacactcacacacatgtgcatatgcacacacacatatgcagacacacaagcacacatatacacatatatacacatagatactcacatacacatacatatatgggtgtgtgtctgtatgtacatgtgtgagtgtgtatgtgtgggtgtatgtgtgtgtatgtatgtctgtgtatatgtgtgtgtatatgtatgtgtgtgagtgtgaatgtgtgtttgtgtgtctgtatgtacatatgagtgcctttgtgtatatgtgcatgtgtgtatgtatgtgtgtgtctttgtatgtacatgtatatgagtgtatatgtgtgtatttctgtatgtacttgtgtgtgagtgcctgtgtgtgtataagtgtatgtatgtgtgagtgtgtgtgtgtgtgtgtgtagtgtaggtgggggcaggctggagagttgactcagcaagaaaggatgcctgttactcctgcagaggacccaggttagattgccagcatccatgtggtgactcagaaatatcaacaattctaattccagaggacatgacaccttttcccaacctctacaggtatcaagaccagcattcatacacataaaatgaaataaataaatctaaaaagaaactgacttaaaaaatcccatatttgctacacatggaggtatccatcatgccaatattttatttaaatctatacttagaggagcaaaacatttgggagggggcagtgagatagctcagtgggtgactctaactttgtcaagctgacagaagccatctcgtttagtgacaaaataagatccatacgtgaaatgagaaaatttgttcctcccactacacatggctcagaaaacaaaaactaagttaataaaaatgtttacaaaattatctgtaaaatcattaaatttattttttgaagaattcacaagtatgactcctaatttataaggctaaatgggcacagagatgtgaaatcttgatgtaatgtgtatgtttattcatatacataatatgtcatgactaacaagccagacttagcaggtctgagaagggcctgaaacatctacattttgaaaaataatatggagtaggtggtggaaccccaatttggaaaaacatcttcctaaatgtgctacatcaaaattaaagaaatacacagctatgtcacttgaaacaaataacagaggttatggtcactaacctatagctctttattgtctgtagcagataaaactcttattttaaaaataagttttactagctgggtagtgttgtggcatgcctttaattctagcacttgggaggcagagacaagtggatatttgagttccagaaaagccaaggctatacagagaaaccctgtctcaaaaagagttttccattttttattattaataacaaaaatataaaaataaattctatttatgattattgtttgtgcaaaaatatgtgagtgcatgcatgtgtgcatgtgcataggcgcacacagacacatagacacacatagacacacacagacacacacacaaacacacacacacacacacacacacacacacacacacacacacacacaccatggtgactaaaagacaactctgtggaattggttctcctctacatttgtatgggcttcagggatcaaattaaggtttccagccatgtatggtaaatgcttttacttactgagccctcttactggtcccatacgattaattaaattaaaattttaattaaaaatgtgtatgagtgttttccttgcatacacatctgtgcactatgaatgcatctggtgcccttgaagaccagaagagggcatcaaatccatggggactagagttacagatggctgtgagccaccatataggtgctgtaaattgaacccacactctctgtaagactcttacttaactctcttaactactgagccatctcttcagctcactcataaaattcttctatgttttatttttagcaactatcagtgaacaatatccaattatactgcagctgaagttctgccctagttagcagagacaggcaatcatgacaatgttacacattgatagagacaatgttacagcgccacatttgcaatgtactgctggagtgcggtgatctgcggttactgctctcagatagtcacctcatgatatcataacagactcaacagcagcatcaacatcaagacctctgccatggatttactcttaggaaaataatctgtttaatgaataagacacaaatgacatctcaaggtttggtttggttttgatacaagttcccactgtgtagattaggctgacttcgaactcactattctctacctgaagctgccccggtaccaggggtcatccctctgagataatgtaatttagtgatttacagcccaaagtaacttatgatgatatgttttgatataatttctgtagtgctgatcagcttgtaacaaatgtcaaaatatttaaataaacgccagtcacctaaggaagggaccaccctaccaagttcaggtgctttgagtgaaaggcaaatgagaggttggatcagaagacttagatgagcatgttaagagggctatggaagggaggaatttgagcttctaaacatgttctggaattctccagtttgaaactagataagcaataaagacaaggaaccgcactgaacgttacattgtagttcaagtcagagagagaaacaccttaacaagagatgaaagacagagcagtaggatgtgggaaaggccagacaccaggcaccacagatctgctgtgtgcagcgggagcactagaaagagggaaggacctgggaaggaagggcgttgattctggtggaccagttgcacatcctctgtgcagccaggggggagtgtctgagagccagacactatgaagagtcccggaaaggtggacataaaaagccttggattgaggaaggaaacctctaggtgtgccccattgttacgttgaataaaatgaaggctgaagatgagaataattcatttagttaaaagacatagaagagagttatgtcctcaagagagttttcaagtattcccaactgtttgctgtaggtgacaaagtctgaggaagcatcctcccttcccaatggagatgtagcaggagaggcagagggtgctgcagaggtaagggctggtgctgccagtgtcctcagaatggctgatggtcctgaaatnnnnnnnnnnnnnnnnnnnnnnnnnnnnnnnnnnnnnnnnnnnnnnnnnnnnnnnnnnnnnnnnnnnnnnnnnnnnnnnnnnnnnnnnnnnnnnnnnnnnnnnnnnnnnnnnnnnnnnnnnnnnnnnnnnnnnnnnnnnnnnnnnnnnnnnnnnnnnnnnnnnnnnnnnnnnnnnnnnnnnnnnnnnnnnnnnnnnnnnnnnnnnnnnnnnnnnnnnnnnnnnnnnnnnnnnnnnnnnnnnnnnnnnnnnnnnnnnnnnnnnnnnnnnnnnnnnnnnnnnnnnnnnnnnnnnnnnnnnnnnnnnnnnnnnnnnnnnnnnnnnnnnnnnnnnnnnnnnnnnnnnnnnnnnnnnnnnnnnnnnnnnnnnnnnnnnnnnnnnnnnnnnnnnnnnnnnnnnnnnnnnnnnnnnnnnnnnnnnnnnnnnnnnnnnnnnnnnnnnnnnnnnnnnnnnnnnnnnnnnnnnnnnnnnnnnnnnnnnnnnnnnnnnnnnnnnnnnnnctaatcatttatccatccatccatccatccatccatccatccatccatctatcattcatccattccccaccccttacttgttaatctgtctacattattcatttatacccatctgtctatgcacctgtcacctttactggtcttaaactcaatgcccgcactcaacattttatggctgcagcatgcatgcagtcagtctgttagcagtttgggggggcagttggggagattgtgtcagcatctaaatgaccttgtgcaaagaaggtctttgctggtgtcacttatgtgccatggtggaaatgggaagccatagcaggcatggcctacctttttacttgggagcttactgaaggtcagcgatgccttaagtttcttttctaaacagggaacagagaaggctgaaaaaagtggagaaaatgaggcacagaaagaggacagtgaagacactggagagctttctgaatcccaagagaagaaggtgagtagtctctgctcctttcccattactgaggtcctggaaggagctaggaattgtgctgtgtgctgggttcatagctttgagaaagaaggtggacactgagagcttagctgtgaggaatcagctattcatctctgctttactgctgtggactgcgtgtgagagggcgagagggaggaccctgaaccaggcttggtggagaagagtcagggcaagcctcagtgatccatgaatacgtccatgaataagtcacattcatgttcctgtcagacaaggttccttgatcttgaatgatgactaactctacatatagcttcccatgagcctcctgggggaaaacagtccatgtgttgttgaaacagcaacaggaacttgaggactgaagcccagcactgggaaagaaactcactgaattcaggatccaggggaccaacaggtctcagagagtctgaggcatgtacagaatctgatcctaaagagatctgctgttcagggatagccagatgataaagatgtgtgggattctataagcatcagaacaatgggtatgggggccacttgcagaatttgggaatttgactgacaaggcataggggtggtgttggctgcccaggagacttgtgggttggggtgggctacaggcctctggctgagcctcctcacgggctagcatcaataggaacatcatgagggcatcacaaagtggtggaaatatcacaactgcctcatgtttgtgttgcctctgtctgtaaagtcaccttgtgaaaaaggtggaattattttgagtcgtgttggttaccagttggttctcctcatctgaaaacccaaagccctggccttggtgacacatagttggggtctcaccacaccaaagtgccttttataaggccagcatggatgtagctacaaaatgcttgcaggcccaaggctgggctaagggctagtgactcagaggacaccccagtgctctctctcctgccagttctagggccagctgccctttcaggccacactggcaggcctcagcatccatgtctgacactcgtcaccactgacacctgctcttggtactgtcctagtgccgtgccagtggcccgaatcttggctgaggtcctagcagaaaatagctgctgtggcaggtcggagacttctcacttcccatgtttgcccccggtggttcctgtggaggactgcacagtggcatcatgtgggcaataagacactcacagtgctggttcccacccactctgcacctggttcttgacctggcacttacagccttctttataagcctatgtgattattttctaaccacaaaactgacttcaagcgtttcgtatagttgactttttaacagcggcctgcttcagaaaattgtctaactctgtgagcttatgttggaaagcttttaaaattaatatattgtacctcaacctaagtaggattgaaagcaggagtggcatttgctaaacatatccagttcacattttatcagtcgattgaaccatcaccccatgccaggcagaacttcagtgactgggaaggagccatgggaaggcagagtcctgccctgacaggaagcctgcactctgagctagcacagacatctgcagggcccttgaagatacttttgggactatttctataagagcactgagcaggtgactgttgccatttagtacatattccaagaaatcgggtcagtttaagtactgataaggagtgcccagtccctcttctggttgagaccagcggttactgcagtaaccccctcccccaatgctgttcaagcaccatttttaataacaccttgtttcacttggatttaggaaaatataaaaccctatagaattgataattccatgctatatatgatgggttttaatttgatgacatgaaattaagaagaaaaggaatattttttgaaaggcagacagtaggtatcagccctcatgtgttcttgctcccggccatttgctggtgttcattgagtttacatcttggccccaccagtggcaggatcctgatagtaaataagggatagatcacagcccctgggagcacacaggacagtcagacagacagacagacacctcagtgatggctgtgggagccagtctgagggcttgtaactcagtctcctgggttaggaaatgccttccctgcaaaacttatttttagtggctgctgatataaaaggatttcatgagattctgtttggcttaaggaggagtgaggagttgggaaaccagagggataagcagagtccagatggcttttagccattgttttaaacactaagaagatgttgcaggtttgagaggaatgagatgaaagagttatcctttaggagagttattggcgagcaactggtctccaggattcccaaggtgtgagcgcctttagtgtagggaacaaagggaagccctgnnnnnnnnnnnnnnnnnnnntatgtgtgtatgtatttgtatatttgtgtatgtatgtgtatatgtatatatgtatgtgtgtatgtgtgtttgtatgtgtgtatgtgtgtttgtgtgaatgtatgtatatgtgtgtatgagtgtttgcatgtaggtatatatatttgtgtgtgtgtgtatgtgtgcgtgtgcatgtggcaattggacatcaatgtcagatgtcttcttcagccactccccactgtcttttgtgtggcaggtgtcatgagagtcctctgcttaagtttggtatcttgttcctgttgtgtctttggcacttacgcttctcagtaatgacgtggctttgtataaactagacggaagaggcaccagaggaaggagcagggggggaagctgaagaagaggagcctgaggaagaggcaggagaaggggaagattcttaggcctttcaggctggtgcttcaactttcccaggtaggagcataattctggagctgagtgctagctcctgtgtgacctgtgtgacctgtgtgacctgtgtgatctgtgtgtcctgtgtgtcctgtgtgacctgtgtgacctgtataacctgtgtgtcctgtgtgacctgtgtgacctgtgtgtcctgtgtgacctgtgtgtcctgtgtgacctgtgtgtcctgtgtgtcctgtgtgacctgtgtgacctgtgtgacctgtgtgtcctgtgtgatctgtgtgacctgtataacctgtgtgtcctgtgtgacctgtgtgacctgtgtgtcctgtgtgacctgtgtgtcctgtgtgacctgtgtgtcctgtgtgtcctgtgtgacctgtgtgacctgtgtgacctgtgtgacctgtgtgacctgtgtgacctgtcacaggtctatctctcctgctcagctctgtgcactgcaggcttcattggctaccatgtctatgagtttgcactagggcatgatgggaagggaataaagaagggtcagtgtgcatacacttcctcctctacatgatatttacttaagagctggcacagaagcagcttccggtcctgatgcctctactagccagcatgcttgcatgtccacagcatgactgatctcattactgatgatgctgactgcaaatctaatccaaaagtcactgagctagctactgcttcatgaaagacaannnnnnnnnnnnnnnnnnnnttgctgttgctgtgcatgtcatcctaaggactgcacagtctgtctccacttattaatatcaactgaacatttgtgtgttcacactgtggaccaggaacacttgtgtggacacactgtggaccaggaacacttgtgtggacacactgcactagaaacacttgtgtggacacactgctgactagatacacttgtgtggacacactgctgactagatacacttgtgtggacacactgtggaccaggaacacttgtgtggacacactgtggactaggaacacttgtgtggacacactgtggaccaggaacacttgtgtggacacactgtgcactaggaacacttgtgtggacacactggactaggagacatttggcttttgcttccttgtggttttaaatatctgttggtgataaaacagtaactatgtaattctctacaggtaggtaagtatcacatgagtatgttaatgggagaatggcagtttacagtgactgggaatatgaaggatgtggtgggatccttagctaccagaggctaggtgaaaaccctagaaatcaccttgtgctgtgaaagcagctggtttcttgagacacaaggacaacacatttgcaaaaaggggttgctgctgtcattgtctttgtgacccactctggggcagcaggtattttaggatcgtccttacaatttttctgccatggctttaaaaaaattgaagagtattttagtctctttcctgtctatatcacacctgtgttaaaagacgtgagtcagacttccagttacagccaggagagcagctgaggaggacataacaagggacgagtaccccagcacacagtaggccatcagcaagacctgtgatgagacttggtccccgactagaaaaaaaggttcatgtagagatggaaaaggaactccttggtactctgatgtattgcttaaggaacaacttaagcaatgctgtgtagacaaccggtgaggtggggtctgccatcttgaatggttggtttagtcagctgagtgataacatttgctggggtcaccagtgcagcctttgctgcattcctctgtgtgtgtgtgtgtgtgtgtgtgtgtgtgcgtatgtgtatgtacacagagtgaacattccatctcaaaattttcatggaaaagaagcttcaagatggtttgtgtgttcttaggacatcttgaagctggtgggaatggctatcacagtttgttactggttcataaaattataaccttccatttatattacacaggacttgatgcctcccccatccccatgtttcttttatgctgtggatacacaccactgccacctggccatagaattctacttagttttgtttgttttcttgagacagggttcctctgtgtagccctggctgtcctggaactcactctatagactaggctggtcttgaacttcagagatcctcctgcctctgcctcccgagtgctgggattaatgacaagcactaccaccactaccacctggccacagacctctactttaaggtcaactgtctgtcagattttggtaacagctccactgctaaggaatgaactgggactcatttttgagaattttataaaattccatcagaagaactggggaaaatgcaaaagtgataaatttaccatcaaactaggagtaaagcaaattgccacagggccacagggccacagggccacagggccacagggtcacagggtcacagggctacagggccacagggccacagggtcacagggtcacagggtcacagggccacagagccacagggccacagggtcacagggtcacagggctacagggccacagggccacagggccacagaaccacagggctacagagccacagagccacagaaccacagggccaagagccacagggccacagaaccacagggccacaggcagcttcccaaatactgcagatccatcactactcacaacacttgtagagttccttgaaaattatgcagttctgagatgacgaccatgaaatcctgagtgtgaaatggcaccgtggagagagaagccttagtgtgtggttgttgtccaggttcaaccccagagttaaaatgaaagcaatgtggcactgggcagagcatttggtgtgtttccccgagggttctaggttggaacccagccagtagtaatctgtttcagagtctgaacacctggacgtgaaggcgggacccaggcagcaccgcaaatttcacccttgactcctcttactttcttcacgtgcgccatggcagatagcagggtccaagtccctgggaaccactcagcttccagaggcaagcctgtctctgtgctgggggatttcatactcagattgaaaacgtgacctgctggagtgcgtggcagtgaacagaactgtgaagacactctcttgtgcagtctagagttggaatccaaactatgcttgaatctgaggagcaacagtgtgtggttttcagattctgctttggtttttttttttttttttttgttggtggtgttgtttgtttgtttttgtcttttgatgcagagtctcattctgtcaccctggctggccttgaactcatgaactcacagagatcctcctgcttctgcctcctaaatgctgcctttaaaggcatggtggcacagacccagcatagtattcggaattgaattcctcctcctgaggctggacagatggctcagtggttaagagtacttgctgctcttaccaagcattcaaatttggttcctagcacctaaattgcctgggactcaagctccaagggatcccatgccttcctgtggcatccatgggcaccctcatatacacatgatgcacacacacgcgtacatatgtgtataaacatacatattaataaacaaataaataacactccttcccaatgcacatgactcaatcctgctttctagtggagacttgcactgttgaaattacccatcaggaacttggctgaagatgcaaccgctctgccttccactaacaaatggttgggaagccatagagagctttcctttcttctggtgtttggtatatgttaggtctgataaccagtacacacctggctccgttctcatgatggagatttattttctcttctttacttgcagccacaaatggtaaaatgtggccctgccttcctggtttgtgggttggatagtgaagatcacagtgatcattctgtctttaacagtcttctcacaatatttccttccttctagaatatccgagccacgaggctacatttgaactctctcttctccattaacgcaacgaaatacttggctggaagccagcacccttccctcggcacacctgggttcactgaggactcacgccctcccagacagctaggtgcatgtgggtctctacctcactgtgtcaacacgaggctgaatgtgaagactgcacgcgtacgctgcctgaaatttttggtctttgcttaacgtttgtttccttggctatgcacaagtagaccttctcgttaatattctgcaaacaggatcttgaggcgtagtttcccctctgtgacatagcagaaggatttctttgtgtactgcttgttttaggcttggctttcagaacaaaacacttcccagagagcaatcataaataaagattgatgccaagaatctacctggtcttattgtttttctcctcaccccttcctggttcatctctctgcctctgtgaggacttgaacttgctctttctgttcagactaagtcctgtataccctgtcgtgccaattggttcaggttttcaagtgattgctgtgcacactctgcagagcactgacacccacacatgcaggggtgcagctaggacatgatgtctgcaacttcacggtctttgtacaattttggctgcaggaacctctatgatcccctggctgccgattggtttgcagggtcagcaacagctgactgcttcggataggttggaccacatcactctgcttgcctgccaatgttactttatcagagctattttcttccctgttacattctgtggcactccgtttcccctgccattctgggcagggatggatgcctctggctctgggggtggggtaggcgtggggcagaggtgggggtaagggtacgggcgggaggcaaggctcctatctttgctgtgctgtcccctcttgtcacagtcactgtgttagtgtctcctgcagagaggtcaacttccctcagctgagccatgcgctgtttacaatgtactatttagctgcagcagtcaaactctggaagatagctcttttcttgttaccttggtaacaaaaagagacttttttttttgaagcaaattagtccctcccccaatcactgaagtagctttcctttaaaaacgtttctctaagaattgggaacaaaacacccatggacggagttacaaagtttggagctgagacaaaaggatggaccatttagagactgtcatacccggggctccatcccataatcagcctccaagtgctgacaccattgcatacactagcaagattttgctgaaaggacccagatatagctgtcttttgtgaggctatcccggtgcctggcaaacacagaagtggatgctcacagtcagctattggatggatcacagggcccccaagggaggagctagagaaactacccaaggagctaaaggggtctgcaaccctataggtggaacaacaatatgaactaaccagtaccccacagagctcgtgcctctagctgcatatgtagcagaagatggcctagttggccatcattggaaagagaggcccattggtcttgcaaactttatatgtcccagtacaggggaacaccagggccaagaaatgggagtgggtgggtagtggagtcgggggaagggtatgggggacttttgggatagcattggaaatgtaaatgaagaaaatacctaattaaaaaaaatttaaaaaaagtttatcttctaaaagcaaggtaggtaaaagactggtaatagggaaacgatgggtgaggttggcctctccttgtgagtatgtgcacatgtgcacccccaaagaactcaaaattccgtgttgaaaaacaaggaggacccctcctcaattaattgactaattttatggtaatctgatgggattaaagagcttgattggtctaaagaaggcccgagcattcaaagtaagatttttttttaattagaaaatcagtgacataaaagctaatttgtttctttaagcctgagtagtctttgttgctcatccctggggagggtcctctgtcccactggtgcaagaacctacctcacactctaaggaccactagggggcgacaaaacacaggcttcgtggtctggtgccgtggcctttagggccagctgcctgtttgtccacggtagggtacttcaggatgaaatcactgggcagccaaggcgtttaccaaggaagagagcaggcaaaactaaaacctctacacaatagtgagctgacaagcacgtcgtcgttcataatgtttttattcgagatcacgtgcaggtctaaaattaaaatttgtgcacatatgaatctattgcatgtaaacacagacatatacaaaatactgggctccatggtgacattttctttctttcttttttttttttttttttttttgtttgtttgttttcgagacagggtttctctgtgtagccctggctgtcctggaactcactttgcagaccaggctggcctcgaactcagaaatccgcctgcctctgcctcccgagtgctgggattaaaggcatgtgccaacatgcccggcccatggtgacattttcacacctacctggcaagcattttctgctgttctcccttattgtacacactctctctcatgtccccattctgtcctctgcaagttcccatgtcctaaaaatcttttgtctttaaatgtgtatgggtgttttaccttcatgactgtaccacatctgcagtacctggtccccagggaggagagaagagggagccacagcccctaggactggagttacagacacctgtaagccactatgtgggtgccgggacttgattcttggttttctgggagagtcccctcaaagctttaaaactttactagtcgcttatgtgtgcgtgcctgcattagtttatgtgcactttgtgtgtacaggtacctgagggggcaacaggatggtgtggaatccccagaactggagttccagacagttgtgaactgtcatgtgggcaggaaccaaacctgggtcccctgtaggagcagtgactgctcttaactgctgagccatgtctccaacccagttcttaaaaacttcaaagcaggcaaataatccgctttcccatgcttgccttccacaggagtccatgctaactctgccagccccatgttggcaattttgataaggattcttgatcttcctggaccctcagggtgattctgaatacctgaatatctggaaacatattcctgacctgagctaaagcatccttttatggctttctgaagcctatggctttctttcttttctcccctacatttttttttcttccaaagtgcttggttttggtgtttttcattgagttgtgaactctttttcttttttcttttttttggtttttcaagacagggtttctctgtgtagccctggctgtcctggaactcactctgtagaccaggctggcctcgaactcagaaatccgcctgcctctgcctcccaagtgctgggattaaaggtgtgcgccaccactgccagcgaattgtgaactctttaaggtgtgttagtatgctgtggtgtttaaactagaagcctggggctgctcaagcacatggtttcttctgggatgcagactcaagctggcgaggactccagtgtgaatgtcgtgtggttggggaaggcttaacgtggggatccctgtcaaggttagcgttgttgtagatccaacatctggttcttgccagcacagctgctcagtaccttctccaggatggactagtgggaatccaggtcactgtgggagatacagcagcagcagtgcctttcctgttaattttgttgttgattgcatcctgctgtgagtcaggctcctgaataggaagccttacatattcatttttgcaacctggtgaatcctgtgacagacggaaggaaaaccgaggcatccatgtttgtatgtgagctacaaagtctggaaacacaagggcagaatatgagaagaacgcctcacctcagccgccagcaccccagtcttattctactgtggttcctggctttgatcacagcccaccctggataatgcttggcacagacatttgggagaatgcatcttgctccccagagctccacctttcctgaccctttctaggtctttgttctgtcagtagactcaatgttgcctccaagacaagtcctctgagccttggagtatgggagtctctgtttgggtgccagttggtttctcactgaagtggatccattgcatttggtggctagaacaaagctctaacaacttactttttttctaatcttaacaatttcataccctctaataaaaagaatgacttttttaatgtcttcattaaaaacagataaaatgttacccaataaggagttacagcaggattgttgattgtaagttccaagtggtagttttatctctttcattctataagctcattatcagttcaaagcaatagttttatccacaggttcatcatacagtcacagcaatagcttttttttttttttaatgtaatagaatcacccactcctttatttagaattccccacttactttattatggtgaacacctgtggccttatccctggacctgacctagaatgaatgatttccttgatcattaatttgtttgaaacctatttttcttcctagtgcaatttacatgcttattacacataagagctcattgaactcctttttgaactacacagcctttggtattctgtggcaggaggtacattctgttttcgattctaaccttaaactctctatcaactatcttaacttcttaaaatcagttacagggattctgtaaaatcagtatcaggaattatataattcatgaattaccaatttatctaaacagcattatttcatgaaagttcatcttcatgttgatctgcaggaaatttgcccaatagggtgggctaatccccaggagtcattcataacagtgtcctctaggtgactccaaacccaggggagttgccaactgaaagtaagcacccattgcaaggctctgggcagcacagctgtggttcctcataagtagttctgatctcaaaaagaatttgtgactattaagtaggaattatagtttttgattggtcactattaattcctacctaatgtgtcactaattaaaaatattttgatttgtgtgtatgtgtgtgtgtgtgtgtgtgttgtgaggtaggggcagcaacctcaagtgtttgtctaccatcaggtttttgaggaaagggggtgcctattttattttagaagtatgcgtgttttacttgcatgtatgtctgtgtaccacatgcttggtgcctgtggagtcagaatagagagagttggatcccttggacccagacttgcaagcaattgtgagctgccttgtgggcgcagagaacctggatttctgtcagagcaacaagtgctcttaaccactcagctatctcttcagcctgcaaatccccctctctttttcccctaaaacaaggtttcattaagtagccctggctggcttgtaactcagtatgtagacccatagagatacgcctgcctctgcctcctgacttaaccaccatgcctggcgggtggctctttttgtcgttcaccagtctggctgctccacctgcttctgggattcttctgcgttttcatggcatctcaccctaggagtcctgggctacagctgccactgcacttggctttatgtaggttcggtcctgatgcttacccagaaagccttttactcactggaccatctccccagcatctctgtttccctgtagcttcttttcctgggagaggcctggagtggacacgaaaaggtataaaggtgaccacaccatagacacagtattcggaagtaccggaactactgtagattattctccagtgttaaaggccacctgtgatttttaaatctaagaatgaacccaacagacagtgcaaacaaaaaagtaaacttgttttacataagatctcaaactgggaagttcccaaatgaattgcaatgctc

SEQ ID NO: 836 - DNA, 567 bp, Mus musculus
atggttatcaaagtgtttgttgccacatcttctgggtccatagcgattaggaaaaaacagcaagaagtggtgggctttttggaagccaataaaatagacttcaaggagctggacatagctggggatgaagacaacagaaagtggatgagagagaatgttcccggggagaagaaacctcagaatgggatccctttgccccctcagatcttcaatgaagagcagtattgtggggactttgactccttcttctcggcaaaagaagaaaatattatttattcattccttggtctggctccccctcctgggtcaaaggtgacaaagtctgaggaagcatcctcccttcccaatggagatgtagcaggagaggcagagggtgctgcagagggaacagagaaggctgaaaaaagtggagaaaatgaggcacagaaagaggacagtgaagacactggagagctttctgaatcccaagagaagaaggagacggaagaggcaccagaggaaggagcagggggggaagctgaagaagaggagcctgaggaagaggcaggagaaggggaagattcttag

SEQ ID NO: 837 - protein, 188 aa, Mus musculus
MVIKVFVATSSGSIAIRKKQQEVVGFLEANKIDFKELDIAGDEDNRKWMRENVPGEKKPQNGIPLPPQIFNEEQYCGDFDSFFSAKEENIIYSFLGLAPPPGSKVTKSEEASSLPNGDVAGEAEGAAEGTEKAEKSGENEAQKEDSEDTGELSESQEKKETEEAPEEGAGGEAEEEEPEEEAGEGEDS

SEQ ID NO: 838 - DNA, 89567 bp, Homo sapiens
gctttttctctatgaaagtgaatcacctgttggcagttgattgggaaattcttggatgtgattatcaaacagtgatgttgaagtaagatttgaaggagccatacacagcagtgccttttcaagtttttggcagaaaagatcttgtggctcacctgcctgctctttctttccagtacagagttgaacataaataattaaagtttttggattatgtgtttcttgcctgtcaacaataaaaataacaaaaagacgaccctcttggtagctaattgtaagcactggattgtattttagaagcagagacagtgactgatttagtattatatactaaaatgtattctggttccatactttcatgaattatcagattcttggttaataatacaactagaaaatcctaattcttaaaagtaaatattttgttacacgcatataatgaaaaaaattcagtagtaaatttataattaattcataaggataatttaattcaaatgattacatctgtgtttctggctgaaattattctatgggtaggtaattacatacatattttttgagatggagtctcactgtgtcatccaggctggagtgcagtggtgttagctcagctcactgcagtctcgacctcctgggctcacgcgatcctcctgcctcagcttttcaagtagctgggactacaggcatgtgtcaccatgcccaactaatttttttatttttgcagagacgggattttactatgttgcccaggctggtctagaactcctagactcaagtgatccacctgccttggcctcccaaagtgctgggattacaggcatgatccgggccacagcacccggccagtaattatattcttaaccagtcctgcctcttgggaaaaaaaacttactcagcatgcaaattttccctcttttcttatccattctcaacatttcctattgccttccccatttcattttttctctttaacacatactatctaacctaacacccattttacttcctcagcctgtttgtagcctggcttccccactaactgcatgcttcacaaggcatgcattctggctcctttgtctattgctatatcctcagtgcctagaggagttcctgagaatattaagtgtccaataaatattgatcaaataaattaatgttccggatgcctctgtgcttaattcctctcttcatatccattactcctgaaaaaacttctcattactgctaacccaatctgaaaagctccaaatgaaagctttcccaatgtgataaatacctatctcaaacaaaaaaacagctttaagcttaatggtgaaacattaatttacactgatgtaagaattaagataagaaatgcctactatcactgttgttcattaatattgttctggaggtactaggtctaaatattggaaaagaagaggcaagttattatgtggaaatgaaatgaaatgattatatacttataaaacactatcaagagaattaaattgacatcataggttacaaaatggctataaaattaatcttttttttgagacagggtctcactccactgcccagactggagtgcagtagcgtgatcacagctcactgcagcctcaacctcctgggttcaggtgatcctcccacctcagtctcccgggtagctgggactacaggcacgtgccaccatgcctggccaagtttttgtagagatgggatttcaccatgttgcccaggctagtctcaaactccttggctcaagaaatctgcccactttggcctcccaaagtgctggaattataggtgtgcctggccctaaaaataatctttcctctatgcaaaataaaacgacttagaaaatagatgaaacataccccacttactatatccaaatatttaaaacatctaagtttactacgaataatatgaaggaaactttaaaactactgaaataaaatatttaagtgaaggacacattttgttcttatatcaaaaggacacagattataaagctgtaaattctccctaatttaatctacatgatcaatgtattctcaatgaaatactgagtaattttgtgaaatttgaccaaacgatacaaaattcacatagagaaataaatatgaaagaatacaaagaaatatgaacaaaaatgatgagaagggactactttgatcagatactgagatagaaaactacagtcactaaaatagcctgatactaatgctttgacagaacaatattctggaataaagagttcagaaacagaaacacaaacaaatacatatggtaacctagtctaagataaaggtagagaaagtggacttcagtaaatgatgagaggtaggctagaatctacctggaaatcaaaacaaaagcagattcttattgcatttcttacactaaaatgacggttagatgggttcaaaatgtaaatgtttaaaaaattattaaaagaaaacacagagtgtggaaaaacataaagcctagaaccataaaggaaacaactgataaaaataactgcataaaaatataaaacttccttataattaaaaaaataataaagttcaaaggcatcttacaaactggaaaaaagattttcaatacatatgacaaagacctaatttccttaatttgcagagacctcttaaaataatccattagtaaaatgggcaaaagatatgaatgcattacagcataaacacattacagaaacacagaaaaccaagagttatataaaaagatgttcgaacttactcataatgaaatgcaaattagattccgcttttcatctaccagaatggcaaaaattaaagaatcagataaaacatattattgttattataactgtgatgaatactgataatgcatattataaaaaataaagcatatctgtgtatgtgtagatatgtaaagttctctaagatacgttcattttccaatcaatgtctacatgtaaaatagagttaaattctcatttttaagatttaagactttcatttggtacagtggtaggctgaataatggtcccctaaggatgtccatgtcctaatccctagaacctgtgttactatatatagcaaaagggactttgcagatgtgatcagtttcaggtcttgaggtgggaagattatcttgagttatcccagattatccatgtggacctaatgtaatcacatgggcctgtctaagaaggacacaggaggggtcagagtgagaaggctctgtgatcacagaagcagagtcagagggagaagacacgacgctgctggctttcaagatggaagaaggggtcacatgccacagaatacaggcttttctagaagttagaaaagggaagggaatgatcctcccttggatcctctagaaggaatcagtcctgctgacatcctaactttagccccttaagactcatttcagacttctgacctccagagctgtaagaaaataaatttgtttgaagccactgagtttgtggtaatttgttatagcagcaatacagaactaatacaggtaccttgaaaaacatcacaaattaaaatgagactaaaagcaggctattaaatgcaaatgaattgcactgttataaatttcaagaagtcagagaagatggtgagttcaaacgttttggggaaatatcttaattgttccagaaaccagcttgctttaccttgccttggactatatctaggaacaagatgaccaacctgagatagctggtgggattgtttgctttggaaaaatgagctggagaaaacagccgaccctctcataagcactccatgaagacttttttttaaagcaggtggctttcctgcagaggcagtggcagaagcatggctgaaggctgagaaagcagagtgaagtagttgtaagggggaggagtgacaaagaggcgtcaggtagctggcaaagttaggaaattaattagagctaacaaattaactgaggacataagtaaatatatttagaatcatggggtcaaatttcttactgtctgaaagagggaaggctggaaagaaccctgaaatgttggattagaatgagaaatgctaggttcaaatacacacacatacacacacaaggagttatatacagttacagatctatgtgcatatatatctataaatgtatgtgtatgtgtatatgcatatgtatgtatatgtgtgcgtgtatttttcccctaactctgctgagagggcctagaatcaacgacaccccagaaacaatgagtacactgtgtaccattctccactaaataccattctctgctataatgaattggggttccttggagaaatggatgatcctaagcctgaggcaggcaaagagaagaaaggctggtgtgtatcaaaagggcacaggagccagctttaagaagctcccactagtcaaagatagggcaatttgaacatcaataccaataaggaggatacatcagcctgagcaacacagggagatgccatctctataaaaaacaaaacaaaacaaattagctgggtgtggtggtacacacctatggtcccagctacttgggaggctgaggctgcagtgaatttgatcatgccaacactgcactccagcccggacaagagtgagaccctgtctcaaaaaaaaacaaaacaaaatgggatttaccacgtcagagtatctcttcccaaagcactaatcaaatgcaaagggaaaacaggtggctgtggagaaacctggcagatttgtgcttgaacaggtaatcaaggttcatgtcaccagggtgggacaggtgacattcactagtgtccatgggcacttgagaagatcacagcaccacttctgtggtctttctgccacaagcacagcctgtctggttagaaaaaaacatcagccagacccaagttcagggtcttcctattgaatgaaaggcttaaactctaaactctttgacaaaaatgttaaatgaacagaaaagctcttctctaagcttataaatgtggtattatatagctaagataatcaatatcttacggttttcaagaacattatttcaaacactttatctacttttatgtgtcccaattttttgcttcagaaattttgcgagtcactctaaacattgacaaagggaggttatgattcttaacactgattggcctggcgtggtggctcacacctgtaatcccagcactttgggaggctgaggtgggcagatcacttgggcccgggagtttgagagcagcctgggcaacatggtgagaccctgttcctaaaaaaaaattagccgggtgtgacagtcccagccactcaggaggctgagcccaggaagtcaaggccgcagtgatgcagtgagctgtgatcgcacaactacattccagcctgagggatggagtgggaccctgtttcaaaaccaaaaaaaaccaaacgaacaaaacactgattgagaggcagtatactgtggaagaaaaaaggtatgttcccagttctgccaatacaactagctattaggcctcaaatgtctaaggcaagaaattaggtgatttctcagtgacatataaggtccagtctagcactaaaatccataaatgaaatatacctatatatataagcaatttcaagtttatttgataacatgaaaatgtgccacgttcaaagtttggatggttacagactagctatgctatgtaggttttggtaatttaacaactttatatattttagaacaaatgtttgaattcactacccgactgacaccctagtcaccttcaggataagaacccgtgcctctctacttccaccaagtggtggcaagtgcaatgtactgcactgagtaaagggctacaaatctttacacaagtacccgtttttagctaccctgacacaacattctttttaattttcagtgtttgcctgattatttttactagattttcattctattttaatagaattgtattaaaacacacggcgcttagtatctcttacatattagaatgttcatttcattcattctttcagcacccatttgagtgcttactatgtgccaggcactatgtggggtgtggagatacaatgatgaacacaaacagcaaatgtttctatttttgtgggccttatgtcagtaatgaactaatcataatagtgactgtccagagtgtcttcaaggaaggagatacaactctgtgaagataaagaaacctgatcctgacagcgatcagggaagttatccctgtagaagtactgtctgagttgagataggaagggtcagtgggaactaattaggcaagagaggatgagagggaggagggaaaaacaatgcagacagagaggaaagaatgccaaggcctggtgggtggaggaggcccatgtggctgaagcccagtgagaagggccagcggtttcagatgagtcttgagacgcaggcgggggtgaacagctgcagggccttcggaaggcgtgtttatgatgtggatcattaatccaagggcaatgggaagctaactgtaggcaaaagagggaggcgggaggggtggcataatcagctctgccttctgaaggttactctggctgcagggtgaagaatcgagaaaagccagagggaatgtggggagacaagctggtacaggactgcggcaggctgaatgaaggtggtggtttgcacttgggtgtccacgacaatgaagagatgtgaaagatgcccaggagacaacctcacctgggcttaaggattcactgggtgttggggtgtgataagggtcaaggaggaatcctaggtacaacggaagaggttccagctggggttgggaagtggggttgtttggttttgtgcatgttgaattggaggagactgagtggtattaagaaacactgtcacgcagctagctgaacgtacgagtctagctgagaaagggtcaagttggagaaaggtaggagtcaagagcacagggctggaacttaaaagctgtgcgtgtgaatctgtgccttgtgctagatgaaggggcgcaatggagaataaaatgggaacagatgccgagctttgagaatctccaatattaaggagcctgggagaggagggtgagccagaatggcagcaggaaaagcagaagagtcagggatggtcacagaagccaagggaagacagtgtttgtagagtgaaatgggggcagcagtttcagatgccgctgagagattgagcaagacaaagcctgaaaaagtctcattcctggtttttgttttagcagagatgaagagggaagccatactggctgaggagtgagagacaaataatagaggcattgaatatggcagttctttaaagtttgcctgtcgaaagggataagggattggacaataactggaaactgaaggggaacgtggggtcaaagaagattctttttttctcttttgtgatgggagacttgaacatgcttcaaaaccatggcaaagagccagctgagatggaacaggtgatcatacaggagagggaatgtatacctgacagggtagagtttttggcgagtggaaagcgatgggatccaaagcacggagagggagtggccttggttaggaggaggaaggaaggtaggaacagatataagtaaggcttgcagttttgggagctgaagaatgaggggattcccatgtgacagcttcaagcttctctatgaagtgacagcacaagggcgtggtgggagatcaaatctgaggaaaatggtcatttatgaaatgcaatctcctacagaccctcagctaaccgtggcaatcctactctgttactttggttaattggggttttacctgatggcaaaagagaaaagatggggctaggagtttaagagagtggcaagggtagggccgggcgcagtggctcacgcctttaatcccagcactttggaaggccgaggcaggcagattacctgaggtcaggagtttgagaccagcctggccaacatggtgaaaccccatctctactaaaaatacaaaaattagctgggcatggtggcgtacacctgtaatcccagctactcaggccgaggcaggagaattgcttgagcccagagatggaggttgcagtgagccgagatcttgccactgcactccagcctggccgacagagtaaggctctgtcttaaaaaaaaaaaaaacaacaaaaaaagagagattggctaggggccttagctccttgagggcagggacctgtcacattgatcgcggtatcagcacccaggtacttactattcaaaatgatcagcatacggatgatcatttgtctgcatctcagtttgcctcttttggtgcttctctaaaaaataaaaaaggaagagcttaaactcctacatgattcctgtctttgcgctgggaagaaggctctgggttcttttgttcttcaggacagtcccttgtaaagctcttgccatagttctgttccaggggcactgtcatatttatacctaacaaagctaaggggtgtctttacatttttagcttgttagcaggatgcttatatggccttgttgacccggtttaaaagttgcaatttgcaaaatacatactgaaaatactgcacttttacctatggaagttgtaatttatataaggaaattgtaatttatataatcctttaaaaaacttactcatacgaaataacagagaacggggaaataccattaagactgtcatgctcaagtgggggaggggcagactcagggaaaccaattaggaagcaagtaaaataatccacgcaccagatgatgggggcctggaccaaggtggtgacagtggcggttgagagaaatggtagaattgtgaatctattctgggtgcattttgaaggcagtgctgacagactgaaggtgaggaagagaaaaacaggactcaagcaggatgcaagactcgggcaactggaggatggaatttccagcaactatgatggattaagattgtgggaggacaggcttggcttggggaattattgagcgctatcttggacgagctgtgtttgagatgccgtagacatccaagtagggatgtggcaggcagctaaatgcagggatctggtgttcaggggaggggcgagggctgggaatgcacacttggggctcactggaattcagataggctctgagtacaggcgactggatgagttcatctagggattgagtgtagacagaaaaaaggctcaagctcacattcagccgtgaaaaaaaactggtctctgaaaaaagttaaccgttggcttaagtgtggcaacgaaacgttaacacgctgaggggagggtgtggataaagagccccgaggctgggtgactgggggacaaacaagacagagaagacatttcaaaagatttagattcctacgagatagggagatgccagcgctaaggttagaaagaaaaactaatccaaagcaaaacagcaagtaagcagaggcaaaatcggaggtcagatagaagattcagatagaaaaaccccaaagttccctcggtggggcggcggtgagatcggcctccgccccctcgccagacccaggcgcggtcccgggagcgctaggtcacctcggcccaggccgtccccctgcccagcgggcctgagagtacgtgtgtcgccggggcgcccggtcactgccgagccggggtagctgttccttggcaaactgtgccgcgaggaggaaacggcggggcgccagcgaggcaggcaggggcgaggactgagtgaccggcgatactggaagcccagaaagagcgtagcaggagggtccggaagggcccagagctggggctgtaacagggtaaccggctgagggggacgacggcagcagcggggccgttacctgctccgcgctgttcccacgactgcgccaacgccgcagcgccggcgcgtccccatggaaacccgcgcgcggggcctcctgggaagcgccggcctgcgggggctgggcgcgcgcatgcgcactcgggcagcaggagccgcggcggggaggggcgtcttgggcctggaggtcagtgtggcctcgcgtttgtcttcggtgacgggaagtgagtttcttgtgtagacgtctgtaaacgatcctcctgccgtccctgttcggcgcccgggaccctgccttcccgcgtggccgcaccgagacgagggagcctgtcacgcgctctggcgctctcctgacctcttaaggctctgtcagtcttaggtaacttgagtcagtaggtgggtgtagacgcctggtcaattcctgggaagcacagttcccctattaaccccttgtcataaagacgattttttttttttttttgtaaaacaaaatctgatgacaaaacaatgcatgtttggcatagagaatttagaaatgtacaggcaagtccaaagcaaaagtcaaaatcacctagatgatggagttatagatgttttttaatgacagcataggaatttggcataatttaggaagacttacattgtttccttttatttatttactttttttcctgcatcaaagccatgttgaatatccttgcagatgaatctttgaggtcacccctgactgtttccttaggataaattcctacaagcgaggttgcagggccaaagcatatgctcactttgaggctttctaaaggtagagggaaactgccttccagtaagtgtcccgatacttggcccgcattggaaattctcttttttcttaaaatttttttgcccattttattgtcaaaaattggcatctttaattgtattcacttcctttttagtaggaagaatagactttttcccatatcttgagtgccatttgtccttattgtgtgatttgcattttcctgtcttttgtccattttaaaacttgacattcatctttgtaaaaatgggttttgtaaggacttttgatgcttgaaaacttggcttgtgatatacgttgcaaatatttcctcaatttgtcagttacctttaattttgtttacagtgtattttggtatttgtgtagagtcaagcttattacatttctctatagtttctgcatttggtttttatataaaaggagaaacgggtgttttttttcaaattgactttaatcctactttggtagaagtgggttaggacaagctttctctccatatcaccatttcttcctctagaaatgcatgacccaccctgagttttggtgggccatgcatttctagaactccttaggtagggaattatccgtataagatgggtgccggttgtttttgctggtggtggtgggcggggcaacatctccaggtaggcaaacattagacaaatgtcactctagacttgacattatggaaagatgggctgatgcttggtgggtggtggtggccccatgacagtaacgagagcggagttttgccattgcgggagcatccaaccctggagctcaggactggaggaattgaaaggtagagtttcctgagaatggtttcctcctcttttctaccagcttttcccagtctgtagacatgataagtcactgcaaatctgcccttgaatctttctttgctttcgcttttgcttttttttttttttttttttgagacgtatcactctatcgctcaggctggaatgcagtggcgccatcccagctcaccacaacctccgcttcctgggttcaggtgattctcctgcatcagcctcctgagtagctgggattacaggtgtgagtcacaacacccggctaattctttttgtatttttagtagagatggggttttgcgatgttggctaggctggccttgaactcctgacctcaagtgatctgcccgcctcggcctcccaaaatgttgggatttcaggcataagccaccgtgcctggcctttgcttttgctttcgaaggggtgttcttttctgtgtacaaaatggaaggagaagagccatggcctttcactattctggggccatctccatcatgccacataaaaagcatagcctttatttctctatattaggttcctaggttcctagggatgtcataacagactaccacgaacttaggggcttagaacaatagaactttatcttctcacatttctggaggtcagaagtatgaaaccaagttgtctgaaagtccatgtttcctctgaaggctcttagggagaattttttgagtcttccagcttatggggactcctgctattccttggcttgtggcagcaccactccaatttctgcttccatcttcacagggtgttcttctctgtgtctccctgtcttgtcttcttataaggacaaccagtcattggacttagggcccaccctaaatccaggatgatttaatcacaagaccccctcaactgattacatctgtaaagactctatttccaaataaggttacatgctgaggtttggctgaacatgaattttggtgaacaatattcaacccactacagttattatggtaatcatttccatcattctacataataaagacgtgtctttatttgtcattttaagttatctgtaaagttatgtaaatcaaaacatatcatctggtatcatttatcatgagatcatctgggggtctctatgaagtttgtagcccagtacctcatgtctttaaatcaaaattaatcaaatcaaaaagtgatgttatttgacttgttaaaatatactccaacagacggacaaaatgaactcctgtttcctaaaatgagatgcaccaaaaacagaatgtcctactcgggaggctgaggcaggagatgaatgtgggaggtggaggttgcaatgagctgagatcaagccactgcactccagcctggtgacagaaacaaacaaaaaacaaacaacaaaacaaaacaaaacctccagaatgtcacagccagaaggatgaggggttagttacgtatttttgcattattaactgctattaagtaagcagaaaccagcttcgaaaaagcatagccaacacaacttcagctggaaaatttccaactgaccccgatagactgcctgatgccagccaatggaaacattccctccctcagtatgcgcccccacccccaaacgccttgcagacctactacaactccagttggacaaaggactggtcttataaacattctttattgataaacagctgcagacctccagccaattttggccagcttatagaaattgcacataaaatgtctttgtgccctatagttcacctgttgatataaagagccaaattccatcccattttaatgctagaactccaccccaaggtgaacatggaatgtatgatacatatatgtttacccactgcacacatgcctgaatttcctcataaatattagtagatcctctgcaaccttgctcagtatgtatgtaaggctgactctgtaagacacagataccagctccttcctcccttctgcagcatgtgcatttttggttttttctgtaagctgcattccccaatctgcaggttgtatctccccctaaaaataaaatctcctttccttcctccgtggatctcctggtctttgtgaacagacataaacagcaagcactggagatgttgaatggttggctgcttgcatcttcactaaattatacaccttctttctgaagtggattttgtaagtcaggggttcattgagctttattttaagatgcatttggaatgttcgctattcctgttaattatgttgaagctcgtttgtgtcattagtgtaataatacattagaaggaatctttcagctggagttttcagatttttaatttgtacatttttatggtcatttcgaaaagaataaacttaaaaaaattcatagtgaaaagggggcactaggaatttgagggtagcatctcaggagcttctcatgtggtgtggagaggaatgggtgaggcttaagtcttggatatgccatttcctattcccatcatctctagttctgtgtcctcatggtgagtgggcataataatggaacacagttttagggttcttatacaggttaagggagtggcttatgcaaagcacctagagcagatctggcacatggacaacacctacaaattgttagctgttatttgagtaggaaattaatttctccccagggtttgcagatggaggaggtgtcattattgagggcagttttcacctgatataatcaagagatgcgtattctctagagcacctgagaatccagctatagtttatgctactaacttacaaagtcattagaaaatatgcccccactttcttcaagtaatatttggagaaatatggcatgcttatgtggcagactttaaggtgtgaaaatatataattgtatgaaaaaataatacgtactgtagaaattttgaaaatgcagaaaagaaaaactgatctgtaatccttggtgtgctttaaaataaaatttataattctactgacttaaatttggggaaccattaatcatcttcatcaaggaccttatttttggagcagctaactttgcatgttgaagccaaaagttaaatgttggtagtcacctcaatcattcattgtgatgtaggggcatttaagcgatattccaggaactgggatattccggggactgggatgtcttttctcgttgcaggcacctacctgagggggtgggaaacatgcctctggggctctgggactcaggtgaagagggagtacagaagcctgggagattcctctctgcttcggaacgtcggtgccacccaatccatgatgggcagcaggggattttaaaaagggagccggagaacagagagagagagagacagtaagagactcagttatctaagctaaatatcccccaagtgcttcttgaaaaactagccctttgtccctaatgcccttgatcttgattttgaaatctatcagaagaatttgcataactggcatttgggcttctttgctagattttgtattcctttaatttaatttgtttgtttgtttgatttggttttgttttagagataaggtcttgttctgtcacccaggctggagtgccgtgggtgtgatcatagctcactgcagcctcaaactcctggctaaagggctcaagggatccttccacctcagccttccaagtcgctggaaatacagatacaggcgcctgccaacatgcctggctgtttttttttgtgttattgttgttggtaaagtcgtacctcagtatgttacccagactggtcttgaacttctgggctcacacaatcctcctgccttgacctcccaaggtgttgggattacaggtgtgagacactgccccggaccttctctaacttttaacacaattcaaaatacctatataaatattaacatgtataaacacaaatatatataaataaacacaaaatacctatgtaaacaaagagcctgttataaacagattattttggttttttccccaagcactttaaaatagttaataaacttcaagtcagtgacaagtaaataaaatagtgagacaattggcttgttgcagccatgagtattgagaagccagcggctatttccctacctccctggatgtcagtgaaactttagatggcccatggctggtcagtttctgttctttaggagaaacaggtgggaaagagagcacactggaaacagccactcttaaaggcatttctattgtatgacagtttacttaaaaaattttttttaacctgccaggaaaaaaaacaaagttgctctttacttaaaggcctctgtggctattctgacccttccagtttatttgtttgccaaaagccctttaaacccagcctcctcctagactgaggtggtgttttctgggcttttccagctcccaagagctcctccctcacttctttcgcctcctgctgctctgttaccggggccccacctcccttggccccaaggcatctctgcacaggtctccgattggtgcacagcacagcctggccttttagggactgttgtcgcgcgtttaaagtgatagggaaagggtccagtggctgcttttatcgaccaatcaaatattttcctgacagatcccaaaatattcctgggccaatggagggaggagcccaagatgcctctgctgctccttggagagacagagcctcttaagttggagcgggactgccggagcccagtggacccctgggctgctgccagccccgacctggcacttgcttgcctgtgtcactgtcaggatttgtctagcggcgcattccctaacaggggtgtgttggggggagtcctctttccaactgtcgaaatggttatcaaagtgtttgttgctacatcttctgggtccatagcggtaggtgtctggtggactctttcttcctatactcttttctgaataacttagggttggaaatatggccaacgttggccttcagtttcttttttgcgtgtagtcagctgtggctctgcaataagtatgtgcgccctttgctttctgcatttgatttcatagtgttgaaaaagcatggaaagggtgtaatctggatggctgggtgtgaaaagggattcgagtaaggaggcgtgcttgacactagaatttttaacatgtgatttgtgttgtgttgccttgtgaatatcatagaagcagggacttttttgtatgtgtttctgccattcattctgcaaggcttaaactaatttaaaattgtaaataaatgatactttgtgtaacactgtttggagcggatgatgaaccagattgctaaaatgactctggggtgtaatcacttgtatatgccatgtaatgatgtaaccatactgaaagtgtaaagttagcatgtgtaatccattgtttgaggaaagtgatgtcacagtgaccagagcagacatctctcaggccacagttataaacactccaggcattcagacggccccaaaataagagctgaaagccgaccttcataaccagtgctttgtctaattttcttgagaccatctacctcttcaattctggccttcattctgtgcaagctggacctgccgtaagaaataggggtgatgaagtgacacatttctctttggaaatgggtcagactttgattttaggcttgaacctatatagtgtctgtctgtctggaactgatatttcgaccagcattttagcagcagttaggaaggctgtggagagaaaaaacagttttattaaacccaagagttagagaccagcaaggcggctgttccttttatatctagtttctggaggatctcaggtttcggctgggatttcagcagccactctgccagaaacagtacccagagtaagccattggctggggtgacagccccaaaggcagccgctgagtgccaccactcccagccccgaaagttcatgaggtttccagagagggtgagaagaaagcaagagaaaatagcttggctgtcccttttgctaagtacaactgagcagctattgttttagtgatctctagaacaaattagccgaaaaagatgagaacacactccaaatgtgaaactctgcgaaatcttttgtggctattgatgactgctgaaactttcagttgatctagaaggagtaaattttttggctattggataaaaaaatttttttgggggggaaaatggttttggtgggctctaaatacgttgttgatgctcattgctaaaaactttacctcttaccagccagtcctctatatattctgtagacctggtctacatattcttcagaagacaatcaataagttaatggatttttaaggtttatttgatgtcctgtgttcttgaagtttgggcccataatttagttagctttggatgacctggagaggcaatgttcatcccagggtcttggaaaagccattagttttggttccctaagcaaatgtttcagtgccacttgtaactgtatgaccttgggaaagttatttcaccttgttaagcctcaatttccttgtctgtaaaatgaggataagaatagtgcctacatcatagtgttgtcatgaggactgatgaaatgatgtgcgtgggtgccccgcatggtgtcaagtgtttatcagcactcaagaaatattctaatgattagtgaatgttatttatacttactagctgctattagttaatattagttgctactataattgttattattagttagttaatgaatattaattaggatttcagttacaattattagttactataattattagctaatattatttagtagatcagggtctatgatcagtatgtgtgagaagaattttccagaaccacatacatgagagaatttctgccttagccgtaagaatgagaattgattatccctgcgatgtcagtgctaatgatttttcatgggtagagaaatttcactcaaaacttcttggcaggaaaaccctagagtggcttcttgtgcccatgctactgtgtggcagtcagtctgccaagcctttcctacttatttcttcagcctgtacatttaaaaaatggattcttgcctgatacctcatcagtaagggcattctgacttctgttggttgaatgaaataaatgagaaaggaaaagcaaattgtaatctccttatgaggaattaaatacatgcagctgtgtattacatctcaattttaatagttgacttcaaagagctgtggcacattttaccacgttctggacggatttgggttaagagaccctggggagcaggagagggcgcgtgacttcttctaggaccctcctctcttccagaaggccacagtggggcaggggggacaaagggagagaggacagtccctgccgtctccaagatgcacagcccctggaaccgatctttaaggacagaccctcatagtggctcttgggcttcacagtcctttctccattttgattgacagtgtaaatatcgtgggaaaaatatgactcttgaattagatcgttgagtgtcattcttggaaaattcattcatttattggagcctcagcattgttataaaatagccatccaaatacctacctagatggcccgtgtgacagtgcactgggatggtagtgtgctatgtggtgcctgacagtgcaggttttcagcctaaggtacaaaatgcttttccatgcatcatcttcttcagttcccaccaaaacactgtgaggaaggcattgttacatccagtttgcagatgaagaaattggagatcagagcccttgctcagaaagcagccttccaagctaggatggaaacacaggtcgtctctggctcgaatccagtgtgctttatactacagtacagtgatctcagttggaaagtctcctaactgtacaagacaataaacgagaggtgccaagtgagtggcaataagaggtgctgctgtcagatcactctgacacagtctagtagctaacagtgtctgggtgactttaggacagagaacaatactttcttataagtaaatgtaacaggataggaaaacggagctctctgagtcttcactgaggtcccaaaggctccaaacaatgacacacaccccaaatacccccagatcctgtagagccactactcaggacagacagtgcagcctggggggccagcatgggccatggcaccctggagggtggagaaggggcaaagggggagaggtgaagagtaggagtgtgtccatgatgggaactgatggggtgctatgcacacccctccctctgggccataaagagatggactcttccaagagctgatactgtgtccctgggagtcagctcagcaggcgctgtgaggagctgcactttgcaggcccacaggagctccttgatcagggaccctgcaagggggaggattttggaggagaggggccccatgctagagccggggcacaggggtgcagcaagacgacagtgccggccaggttagctcatgtgctcactcccctcttccctcctctggcctggatcctaagacccttttctgcaggctcccagcccaggcagaactcaagtgccctgaatagcgtgataagcaatgcactgggctctgtttaaatgactagtgtttgggggattacagggggcaaacagatttcatttttcttcttctttttctccttttttggggatgagggctgagaaatggcacttaacacaatgccatgcgtccaacagtcccgcaatggacctggatgcaattgcctgtcttgtgaagcttaatcgcaagcatggtcttcccctcccattgtctccatctctttttgcctttctaatagaagaaacataagtcaagacttttggaaatatttttcatctattccaaaattatggaataaaatatagcttttttcccatcccacatcaagccctgaggcatggttgatagaaataatgttggtgaggtggcttggacctgggccagctgcctcccaggccaattcgtgctcccaagagggtatcttagaaggctttggagaaagagcagacaggggtttggaccgaataaaggagttgccttctgaatagttaattaaaagtaaaactgcctaaaatgaaggcatctctactctttgaaacagcaaagtcgtctctgaaaagatgtaagggaataagtgctttataaaatggcgtgaatagttatggacaggttggaaaagatgtgtagagaatgcgattaattaaaatgatgatttagtccaacaacctgtcatcaggtctgatgggattttgtaatgttgaaaattcagccgtgaaactgtggaatttggagcagtttccatgtggggtagcagtttccgtgtggggtagcagtttccatgcggggtagcagattccatgcggggtagcagatctagtgccaggcatccacggcacagctgtgggaggagggcaccttggtggggagcacgcacctcctcctttggttctcataggcctgatcctggggaattaccagagtccatatgccagaagtttaagagaaattccatcattccacacctttctgtctatctatatttatttgtccgtgcttgccccaaactgcagtacctttgttggcctgagtcttacagattgagtaagtgttgtgttgtggcaaacagagcctttaatttattgatccactgtctttagttccattgtcttttttatattgatggtataagtgttaaattaaatgcgtgattaccatttatataagtttatatgtgatttgtatacttatttatataaaattttataatatatattgactgtcaattttgttttaaaaattaacatagtaaatataaaatttaaaaaaattaagaattacttgatattaatttatattatataccatatataatcaaatcaccatcaagaccaaattatatataaatcatataaattatgtatattatgtaagttatattacattatattatataaattatataaaaatcatatatagttaaatataaaaatcttattattatattatattgttatatataaaagtcatatataagattattataatatagttacatatataaatcttattatatataagattattatatattatatagttacatctataaatcttatatataagattattatatattatatagttatatataaatcttatatataagattattatatattatatagttatatataaatcttatgtataagattatatattatatagttatatatataaatcttatatatatgattattatatattatatagttatatataaatcttatatataagattattatatattatatagttatataatttggtcttggaggtgatttggttctagggcttaagtatccagatttgtcttacctttccttatattatgaaacacccagccgggcactgtgggtcttgcctgtaatcccagcactttaggaggctgaggcaggtggatcacttgagcccaggattttgagaccagcctgggcagcatggtgaaactccatctctaccaaaaattagccagacgtggtggtgtgcgtccatagtgccagctattcgggaggctgaggtgggagaatcacttgaccctggggagattgagactgcagtgagccaagatcgtgccactgcgctccagcctgggcaacagagggagaccctgtgtcaaaagaaaaaacaagaaacaaaaaaaacaagaaacaaaaaaccccaaacaaagaaacaccctaacaccctatacatgagtcattaaatttgtcaaaagtgaataaaatagatattttggtttacatgtctctaagaaaggagttgagtttagttaaaagagggtttgcatccagatattagatttgggatagacatgtaccttttacagcatttgtttgaaaccctcaaagtgtagtccttcttgtaaacaaggcacatgaaaatgacaaggggctcttgtgctgtaaaacatttttgtgagttgtttttatatgagatggtattctattcagaagacttttaaaaaattgagatattagatactgtcatgtcaaagaaaatttttaaagtttatttatttatttattatttttattttttttaaaatttgagacagagtcttgctctgttgcccaggccagagtacagtggtgcaatattggctcactgcaacctctgcctcccggattcaagcgattctcctgcctcagcctcctgagtagcgggattacagatgcgtgccaccacacccagctaatttttgtatttttagtagagacaaggtttcgccatgttggccaggctggtctcaaactcctgacctcaggtgatccacctaccttggcctcccaagatgctgggattataggcatgagccactgtgcctggcctaaatctcactttttttttttttttttgagacagagtcttactctttcacccaggctggagtgcagtggcatgatctgggcttactgcaacctctgcctccggggttcaagtgatcctcccgcctcagcttcccaagtagctgggattacagacatgcgccaccacgcctggctcatttttgtatttttagtagagacgaggttttaccatgttggccaggctggtctcgaactcctggcctcagatgatctgcctgcctcagcttcctacagttctaggattacaggcctgagccaccgtacccggccaagttttaatcttactcttaataaatggccatacttttgcctcagtatcctgagtgtattctatatccatattgtaccaattagttctgtggttttttttttttcacccaaacaagcagtttaagaatctgttcacatgaaggacttggcacaatgtcttgtgcaaagtagagagtcaataaataactgttgattgattatttgttttattaccctttctttctcctccttccctccctctctccctacctaccttccttccttcttccttttttctttttctttctttttttttttgagacggagtctcactctgtcgccaggctggagtgcagtggcacgatatctgctcactgcaacctccgcctcctggattcaagcaattgtcctgtctcagcctcccaagtagcttgcactacaggtgcgtgccaccatgcccagctaatttttgtatttttagtagagacagggtttcaccatgttggccaggatagtctcgatctcttcactttgtgatccgtccaccttggcctcccaaagtgctgggattacaggcatgcaccgccatgcctgggcctttttctttctttctttctttttctttctgacagggtcttgttctattgccaaggcaggagtgcagtgatgtgatcatagctcattgcagcctccacctcccaggctcaagtgatcttcccacctcttgagtagctgggactacaggcatgcaccaccacacctgtctaatttttaaattttttgtagagatgtggtctctacaaaaactttttgtagaggccccatctcgacaaaaatttgtttgcccaggctggctggtcttgacctcctgggctcaagtgattcttccactttcagcctcccaaagtgctgggattataggtgtgagccactgcacctggtctgattacactttttgtaagtttctccctgtggttattaaaatggggtccacacagtctgctgtaacttatttgccagtgtttataaaagatggcatcatacattttcaggagtgaattctttgaagaaagaaaattgtaattgcttttgtaattgtttatggggaaggagttctaagtgtgagagatggccacgttggtaagaaatggctactggcagatacagtcattacgtgttacacaggtagagaaaggacattcaaccatgttcccttaggtgtggctgcactgaactcagagaggagccaggtgtgagtaggaaaggaggaatctgtgggagaaaagggttgttttgttgtgtggcttttttatgtgctgggagaaacatcctccagctttttctagcctctgcttgtgcccttcccctccagtagtctctgtgtgagctttttaatctcctgtaatatttctaaagctacttttagttcaatgtgactaatactcttattttcataactgaatgaaatgcattttagtgtgggtatacttgatatttgaatttcatagtaaagtatcttttttattttattattttgctttattttttaaaaattaaactaaaaaattttttttgagacagagtctcactctgtcgcccaggctggagtgcagggcttactgcaacctccgcctcccaggttcaagtgattctactgcctcagcctcccgagtagcagagatttcaggcgcatgccaccacgcccgggtaatttttgtatgtttagtagagatggggtttcaccatgttggtcaggctggtctcgaactcctgacctcgtgatccacccaccttggcctcccaaagtgttgggattacaggtgtgagccaccgcacccagccttctattcttctttaaacaaaatttttattttatttttaagagacagggtcccgctttgtcacccaagctggagtgcagtggcatgatcagcacactgtaacctcgaactcctgggctcaagcaatccttttgtctcagccttccaaaatgctgggattataggcgtgagccacattgtctggcctcttttttctcttctttcccttttcccaatcccttgtcttcccaattctgacttactttttggccattaaagctttgcaaaaaattaaaagtattttgaagactgcaaaaaagatacgagagcatctctattccaattaggtcatgtgaaaagacaacattacaactcatctagttttgtagattttttttttttttttttttgcgacagttttgctcttgttgcccaggctggagtgcagtggcgcaatcttggctcactgcaacctccacctcctgggttcaagcgattctcctgcttcagtctcccgagtagctgggattacaaggcatgcgccaccacgcctggctaattttgtatttttagtagagatggggtttctccatgttggtcaggctggtcttgaactcctgacctcaggtgatctgtccaccttggcctcctaaagtgctgggactataggtgtgagccactgtgcttggctgtttgtagatcttaattggcttttgtgattccagaatctggcagcagtcagaccaaaaaatggttcacaaagctctgccccaccacacgtgcaggttatatttatcgccagagaaaaggaaataacattcagaaaaaggatgtgaggtacagacagctaggttgggttataactcagtatttgccttatttgaaagtggtttgaacagttggccgcctgtgattggctgaagcttgtctgctgtcaatgactgaaactcagctctggttacaaaggcaaatttctagttaggttttcagtttgtttatgtactaagctaggttgcagttcattacctaggactcctatggagtcttctaaagcccaaatttagttttaacagttgattatacaataattaattaattattttatttatttatatttttttgggatggaatcttgctctgtcacccaggctggattgcagtggcatgatctcggctcactgcaacctccacctcccaggctcaagtgattctcctgcctcagcctctcaagtagctgggattacaggcgtgtgctaccatgcttggctaatttttgtatttttagtagagacaaggtttcaccacgttggtcaagctggtgtcgaacctctgacctcaagcgatccacctgccttggcctcccaaagtgctgggattacaggtgtgagccatcgcacccagcctgattatataataatttaagcattgatgatactaaaatttcagaatttaaatagtcatttggttgaccctttataacaaagaggtgtgattctattattttccttgtttgaatacttaacaaaattatttgtgttgtatagtataactagaggaaggatttaatttttgtaaatgtaagcaaaatatttttcataaacagcctaatatttctctactcttgaccagattaggaagaaacagcaagaagtagtgggttttttggaagcgaataaaatcgactttaaggaattagatattgctggagatgaagacaacaggaggtggatgagagagaatgttcctggagagaaaaaacctcaaaatgggattcctttgcctccccagatcttcaatgaggagcagtactgtggggtgagtatgtgcttctattaaaaatcctgctgtgtgtgtgtttattagaaattttctaaagcagattaagtttgagtcagcatttgaaattattcacaactgtcaggtcatggtctatttctgccatccaatagctggatggtagatccattatgaataatcaatatttaagatttagaaaaggacagaaacaatatcatgatgattcagaagttttggggattatttcaggttctttgttttattttgaagaattgaggtcacatgttcagaaaatacatacatttagctaggaattctgttcagccttgcagtgtgcacacacgtgtatctgcagaggaacatggtaagttttctctgtcgcccaggctggagtgtagtggtgcaatcatggctcactgcagcctctttctcttgagctcaagcgatcctctcacttcagcctcttgagtagctgggactgcaggagtgcagtactccacccagctaatttctaaattttttgtagagacagggtctccctatgttgcccaggctgctctggaactcctggcctcaagtgatcctcctgccttggcctcccaaagtgctgggactacaggtgtgagccacggtgcccagcaagttttcacttttataaaattgatttgtagaaataaagtcttactatagatacaagatacatttgtgtaactttaattagtttgaaaactgttctgggcattttggttataacaacaattttgttttatacatttgatagttcatttcaccatgagatcactttttttccccagagtttatagatcatacttaataaatcaagtcgttggaaagaaatatttttaaaaaaggacttcagaatatgagaactgaaaattaacttagaggtcatctaagccatctagggtttttgcagatgaggaaatgagagctgtgtgaagtagagggaatgtctcagcgccatgcgcctgggactgctggagccaggtggaggaatcttatctgacctcttctcttgctgcacagaactgctggttctttaggttacttttttaaaaaattgtttactgccactgtctgttttataaatttataaatgaatgtccacactcattcatttacctattgtctgtggctgatttagcaccatggcagatttgaatagatgcagcagaggccatatgatccacaaagccaagaagatttactatctgcttgttcacagaaaagtttgcggacctctcatttgaaggatgaattgtgtagttgttgggggcttgtattagcttcctagggttgctgtatcaaactaccacacacacggtggctaaaaacaacagaaatttattctttcacagatctggagactggaagttcgaaatcaagatgtgggtgcagggttggttccttctgaaggctctgagggagaattcgttctatgcttctttcctagcttctaaagcttgccaccggttcttagcactccttggcttatggaagtgtctctgatctctgccctcatcctcacatggagtgtgtctctctgtgttcacatggccttctcataaggacagcagtcatgggaatagggcccgccctcatccagtatggccccatcttaactaattacaactacaaagatcctatttccaaataaggtaaccctctttttttttgagatggagtttctctcttgtctcccaggctggagtgcagcagtgcagtatcagctcactgcaacctctacctcctgggttcaagtgattctcctgcctcagcctcttgagtagctgagattacaggcgtgtgccactacgcctggctaatttttatagttttagtagagacaaggtttcaccacattggctgggctggtctcgaactcctgacctcaggtgatccacctgccttggcctcccaaagtgctgggattacaggtgtaagccaccgcgcccggcccaaataaagtcactttctggggttccaggctgacatggatttatgggggacactgttcagtccagcagagggctatacaaacttatgtggttgtgttagcattcttcagaggcttaaccaaaagtcctgtgggtgtggaagtattttcaaacaatcttaatgtggtagcatatattaaggtgaacatgtggtccagttcaaattcctcctcacccctcgctcctgtcctacccacatcttccccaccttcctttacctgacccacatttctcaaaattgtggctcttgttggataaggaaagggataatatttttttaggggggatggtggtgatgaggaattttatttcttataaaatcatttctattatataattgaaaaattaatatatatgcccactgaaaaattaaggtgattcaaaatggtatctagtgaaaattattcccctccatttctatttattatttatttatttaagagagagagtcttgctgtgttgcccaggctggagtgcagtggtgcaatcatgcctgggtaatttttaatttttaaaattttttgtagtgacaaaggggtctcactgtgttgcccaggctggtcttgaacacctggcctcaggcaaactcctggcctcccaaagtattgggattacaggcatgagccactgtgcctggtatcccctccaatttctgacccctgtcattctggctaccttcccctgagccaggctggctctgtgggcctgtgatctgggataccacacaggaccccatccacaggagggctctgtacttgtttaatgttctcctattgctgtcttgaaattctcaaccatttttgaaggaagggcctcatgttttcatcttgcactggctcttttgaattctgtagctcgtcctactctgaggcagccagtgttggcaatttcgtgtttgggtttgcagaaattttctatgtagatttacaactgaatgtcatttaaaaaatcagagtgtatcatatacgactttgttttcttgacttaataactgcatctcagagttcacagtatagctgcccatgcttattttatttgttttaattttatgatagggtctcactgtgtcacccaggttggagtgcagtggcgcaatcatagctcactgcagcctcaaactcctgagctcaagcgatcctcctgtgtcagactcctcagtagctgggactacaggtgtgcaccaccacacctcgctaatgttttttattttttgtagagatagggtctcactgtatttcccaggctggtctcacactcctggcttcaagtgatgcacccatcttgcctcccgtagtgttgggattataggtgtgagctgctgtgcctggctgccccatattttaatgtctgcaaaatgttccattgtgtgtgacaattttttggcttggtcctctaatgaaaaacattcaggttgttttcagcctctcccccttacaaacagtgctgtaggaattatctttatacataacagatctttgtatccggtatgagtgtgtatatatatatgtaggataaattcctggaagacatctgagttaaagtacatacgcgtctcacattttgatcaatattggcaaatgctcctctgttgcagttgtactagtttacatttccaccagctgagtttgagagtggctagttctccgtgactttgacaacactgtgcatagcatacttttgcaactttgacaatctgtttggtaaaacatgaattctcattgcttctacctggatttctttctttatgggtaaattgaacatcttttaaaactacatttataaattatctgtgctttttctatgatttacctatgcatattctttgctgttttccaattgggttataggtaatgtttactggtttgtaagagtctttgcatatgaaagaaagtagccctttgaccatatgtattacttcattctcacgctgctaataaagacgtacccaggactggataatttataaaggaaagaggtttaattgactcacagttcagcatggctggaaaggcctcaggaaacttacaatcatggtggaatgggaaggaagcatgcccttcttcacatgaccacagcagagagaagtgcagagtgaagatggggaaaagccccttataaaaccatcagatctcatgagaactcactcactatcatgagaacagcatgagggaaccactcccataattcagttacctctgactgggtcccttctatgagacagattatgggaactacaattcaagatgaaatttgggtggggacacagccaaaccatatcaccatagatgttgcaaatatttcctccacatttcttacttgtcttttgactttcaaaagggattttttttttgcaatgcagaacttaaattttttttgtgtagccaaatatattaaatcttttctctttgtgattcctgaattcagatttttgttaaggaaagctttctgtgctcagaaattatcagaagaatcatctcatgtttccttctagtacttttccagggaaaataagattttaaatgtcttagtttgcttattttaatcatccttttaaatttaagtgagttacagtagacacaagattaatgtaggtgtccaccaatgttaactcctaggataaaattactacagttattttctgctataaaaaagaagatttcaaagtcatctcttatcccagtttgctgtgatctagtaatttttttttcattttaattgcggaggagaaagaaaaggttttccaaataatgactgctatttttaagatgtattttcctataacaaatatggatctaatgaaataaatatacaaattatttcatgtttaactgtttctattctttttatttctaccttcagagaagtatttgtagtttaccttatgagaagctttgcttaatttgcttttctgtggtctatggacacacttacaaaagtatattcatgaagaagagggctttgtttccagaaagtaggtaaaaatgattatttttatttgtatgctcagattttaaaaggagactcaaaaattctgaaggatatgcaggctcaaaataatgttagtctagatagtcaatgtctctttctacatgattaaaatgtatataactattatttaagtggtctccctggcttctgaagattcttggtcagtcatatgccatgcctgatgatggcagcaggtggaaggagaccccagaggcaagcagtagatttcattgggcagtgaggggattggacatcaagggtagtcctcagtgccttcctgcccctgccagtttgaacttctgctactctatgcagagcaaatgaagatattatcctgagagccagggcagacaactgttagattgagaaaggagacaccacactggaagccaggcacagttgaggccaggctccccgcctgacagaggaatgtgaactggaaagagcagacacatctcttgatgacaagttggcatctgtgcattttagcccaggtaagggccggagtgcctgcctgggaccaagatagcctgggcctgactgaacacaaacaaagaagacctagatcgttcagcacagaggtgcccatttagcagaggtatgagtgtctccgggtactcagggctgtaaggaaacacaggatgcaaacccagttagggtggggagagggcttctcaacatatcgatgttactgaacaaactatgttatgttcctaaaatttattctgaaatatgccgtatgtgataagaaatacataatttaaaaaggagtgatacagtgagcaaccattgtatgcactatccagtttaagaaggacagtatactattaccagaaatgtggaagccctctgtgtgcctctctccctgatcccatcccttcccctctgcaccagtgatagtcattggaaagaaagggtcttgctttgtcacccaggctggagtgcagtggcacgatcatggctcactgcagcctcaacctcctgtactcgatcgatcctcttgcctcagcctcctgaatagctgggactataggtgtgcagcaccacacctagctaaattttgtattttttgtagagatggcatctccctatgctgctgaggctggtcttgaattcctgggctcaagcaatcctcctgccttgaccccccaacgtgctgggattactggtgtgaatcactatgcctagaccttatttttcatttaaaaacctttgtcttcttttacctccctgaatatgcacatagtttactatgacacatgtgttcccattgcaattccttattcccaaacaaatataattttcttttagagagcctcttgttcatctgggaagcttgctaggcttgggttcttctctgtgggaaatgtttcaatttccttaatgaatggactgtttaggctatctactttttcataagttggttttcataattctgtttctataaattctaagatgtctagttttttttttttttttgaatcagggtctttgtctgttgcccaggctggagtgcagtggtgccatcatggcccatggcagccttgagcttgtttttaagttttaaagtctagtataacattttttttcaaaagtaagaggaaggtacagaaatttcccatgtaccccctgttcccacacatgcagagcctcccccattatcaacatccccccaagttttaaataagatattcttaagacctgtttaaaataggtagttatgtcttctctttattcctaatgtttctgttgtgtcttctctgatttttttttttaagtttatgttgttcatagttttttgttcatttgtttgtttttggtcttttggcttattgattctttctgatctctctatacttatatctttatagctaatttttctcttatttttaaaatttctgcccttgcctgtatcattttttccttctatacacttttttttcctccccttaccttaatgttcagttagatgcttagctcacttttaacctttttttcttctctaatgtcaatatttaaggctagaaatttctcactgagtactgtcagttcattccatatattttgatatgcagtattttcttttttttaaatttaattttatttattattattattttttgagacggagttttgctcttgttgcccaggctggagtgcagtggcccgatctcagctcattgcaacctctgcctcccgagttcaagtgattgattcttctgcctcaggcttcctgagtagctgggattacaggcgccaccacgcccggttaattttttgtatttttagtagagacagggtgtcatcatgttggccaggttggtcttggactcctgacctcaggtgatccaccagccttggcctcccaaagtgcagggattatggacgtgagccgccacgcccagcctgcagtattttctttattgttaagtataaatgttaagatatttatacctttcttttttgacccatgcattgaaattatgagtacatttggagtttcttctactttattatatgcttttaatttttctcagttttgcagtttttttaatcctttcttgatgtaattttactaaagtctcttttttctaattttattttcccctttactcaattcaaataatctatccttttagtggttaacttagctattttaacatacatacttaaattagttaaagataatcagtaaccttacttttgtcccaaactttttttttttttaaagccagagtctggttctgtcacccaggctggagtgcagtcgtgcagtcttggctcactgcagcctccacctcccaggttcaagcaattctcctgcctcagcctcctgagtagctgggattacaggcacgcaccaccatgccctgctaatttttttggtatttttagtagagataggggttcaccatgttggccaggctggtcttgaactcctgaactcagatgatccgcccaccttggcctcccaaagtgctgggatgacagatgtgagccaccacacccagtctgtcccaaacattaaaagggcctttagacactttcaccctaatcactctgtttacatgtgtttggtttttcagtatttcagttggcctctcatcctgcttcacaaattaggcatttctatttgttggttgaacaatcaatgtttgttcagatttagatttacccacatatttactattaattttatctttacttcttgaatctgagatattccatctggaattattttcttcttcctgaatacatcctataagtttctttaagtgaagttctcttggtggtaacttctctaagtttttgtttgtttaaaaaaaggtattttccagacaatgtctttctttcaccttcatgcttgaaaaaatagttttactgagtctggaattctgggctgatgtttattttttctaaacacattgaaattattattttactttcacctggcctctaagttgctattgagaagtcagctgtcagtctcatcactattcttttattgggaaactttgttttttcctttttcttttcctccctttcttcttctgtccattctgtctccttttcttcttcctctttctcttcgtcttcttcttcccctctctctggttgcttttaataatatttctctacgatgtgtctaggtttagagttatttttatttatctagtttagaattattgattgggcttcctgagactaagggttgttatctttcaataagtctagaaaattattagtaattggccaggcgagatgttgcatgcctataatcctagcactttgggaggccgaggtgggaggattgcttgagcccaggtgttggagaccagcttgggcagcatagtgagaccttgtctcaaacaattaaattaacaaaaaaaaaatgtttagcaattgtatgcttgagtttaggttttcccctataatctgtatttgcttctccaagagctcctataagacatctgttagctcttctcacactgttttcatacaataatatttcctccacatttttcatcttttttcctctctagattatttgttgtttgtttgtttgtttgtttatttatttattatttttaaaaatagagacagagtcttgctatgttgcccaggctggtcttgaactcctgggctcaaacaatcctcccttctctgactcttaaagtgctgggattataggcatgagccaccacacccagcctggatgatttctttgactgcatcttccaattagctaattttctcttcacgtgtgtttgtttaatccacatattgggttttacaattccgctattatatctttttattttcaggagttctttttggttcctttctaaatttgcttgattgttctctctaggtatttattctgttttcgagtttctcttttatttcactaaatatattaaatatagctgttttatattctttgcctgataattccaatatctgattctgatttttaattccaccttctgttatttcttcatgctctcactatgttttctttttattcccttatttatattgtaacttttggcttcaaactgctcatttttaaaaactttattagtggctatcttagtctgttttgtgctgctaaaacagaataccacagactgggtagtttataaacaatagaagtttatttggctcatagctctggaggtggaaagtccaagatcgaggggcagcatttgatgagggctttctggctgcatcaaacatggctgaaggtatcccaggagcaagagaaagggagagcccaaactcacagcctcaagcctttttataaatgtcatcaatcagttcatgagggtggtccccttatggcctcaacagctccccttaggccccacctcccaacactgttgcattggggattaagtttccaacacaagctttttggcggagacattcaaatcacagcagcggatactgtttgaggcctggggtttatttctgctagtttccttagaactgtatcaaacctagacacatcttaaactcagatttccttttaagattttttaggatcacacatggcatgggaatttgaactgcaacctctcatgaattctacttgtggttataaattctcagaggagaatattttccccttcacccagaagcaaagttgaatcagggaagtttccttccattctgttctgcctggtggggtattttctcattcatatttactttgaaggcagaaccctctgaagttctggtgtgtgtgctttatgaaactccccagcttgacgaggctccgggctttatctacatccccctttttcctcttcagtgtcaaagtgatggtaaaggtgtcatgtgtgtgtcagaaactctcagcatgttcggtggctttggtgtgtgcttattctcaggattcacgctctcactggctggactcttttatgccaggtcagcagtgtatttaaatttttttttttcttaattgggttaaaaattttctttgagacaacttttagggcctctaatctgccatagtagcagaactgggagttgaaaacctgttttatgttcattattttctacatatatttggtagcatcaagtcaaagataatgatgaattgttcttcagccttctgaaattctgaagaaggtatttggtcttaaattgaagcaaaagactagttcactcaactataataaaacctttcttgcctcgaaatctagagttggccaactaaagaagttttcagaactttatatatggaatttctgggaaatagcatagatttactttattacatttcaccaacttactgctactactattaacgtgttatctcatgtaatcttttaacaatgattagtaagtgtgtactctgggaatcaatcagaatttctgataccaaagttcctgcacttactcatgatgttatattcctttcaaccaagatttgaggcagcttccaaccatgtattcagtataaaagaataaaattaatcactgagagacttgaggcaatggataggaaaacaataaagctttgaataagagtaacacacaggaggctgggcatggtggctcacgcctgtaatcccagcactttgggaggctgaggtgggtggatcatctggggtcaggagtttgagaccagcctggccaacatggtgaaaccccgtctctactaaaaatacaaaaattagctgggcatgatggcatgcacctgtaatcccagctactcaggaggctgaggcaggagaatcgcttgaacccaggaggcagaggttgcagtgaaccgagattgcaccactgtactccagcctgggagacacagtgagactctgtctcaaaaaaaaaaacaaaaaacagtaacacacaggaatacataatacttttttctcaacagctgtgacctgtatttggtgttaagattttgtgggtttttttgtgagtcagggtgttgctctgtttcccaggctagagtgtagtggcacaatcacagctcactgcagccttgatctgccaggctcaagtgatcctcccacctcagcctcccaagtagctgggaccacaggtgtgtgccaccgtgcccggctaatttttgtattttttgtagagacagggtctcaccatgttgcccaggctagtcttgaactcatgttcaaggaatcctcccaccttggcctcccgaagtgctgagattagaggcatgagccaccacgcctggctggttttaagctttttgaacatacactaagagtagggtaggcaaagaacaactaagttggtttgtgtgttgccctgtaggacaaacacctgtgactttgtgagcctttttgcaacactgttgaaattgcatcaaggccctgatgatgaagattggcagtaataaagtagtctgggggaatatcgtttatgttttaattataaaaattgaaactcttctaagctattgacagctgcattactgggaaggtggtttagggctggacctgcctggtgaaggactggccctggtaggatctggatggggtggtagcttcattgagcatcagatttcaatccactaccaagtttccaatcactccagttgttcctattttgccaaaacagtcgccctctatgtcccccatggtcttgtgcctgttcgtattgggagggcctgagatgcatctgggcccttagagatactttaatcacagtatggacagcctgtatcatctcagtctcagctgatcagggaccatatgcatagggccagattataagtaaaccagctagtggtgtgaaacttggaaaagccatttactgtgtatatttgggtcttgtcagcaattcctgagcatgggtaggggtgtgtgtgtgtgtgtgtgctcttgctgtggtatacaagcacaatgaaagtgtataaaaacaaatgtaaagttcatggttagatttcttaactctggaggttagtcatctttgataaagcaaactgggatgactttttgtgtgagctcctaacttaaggactaagaaatacaaaagatcagtttccgtaaataaactggctcacaagtgtgcagtagttttaaactttctttttctttgcttcaaggattttgactctttcttctctgcaaaagaagagaatattatttattccttccttggtttggctcctcctccagactcaaaggtaagtttgaacaaactccattggggttcaaaacaggtaatactaaatgaaggtagaaatcaccgcatccaagactgtttaatacatgatgatctctaaattaacatgactttagtacacttcttattctgatgcagtcctatgcatagagagaatgcagtttttactaaaaaaagttccaaaattatgcttttcatatttatgctgtgttttcaccttgttacaataaattttataatacctaagttaggaaatatcattactttgaataatcttaagtgcattcattaaatatgtaaacatttgagctcctaggttgtgtttatacaattattttgttttgaattgacttctcatatagctttatatgagttaatttcataatgatatatacccttacattatttctatttaaatgaaccaaactacattttggtctcataaaaatgggacaggtaagatctcgattcaacgacaaggtaggttttatcagatttttttcttccagtgacgtctcatctttgattatgtataattaaatagagagttatgctaataaagcaggaaccatgaatttgacttgtgtgcatgtttaattcatgtgacttgctaagacttgctgatggattgaatgtggatagggatggattccatgatgacttctaatcagtgtgtgtaaaaatccactctgagagaggaccatattgaggggggaagttaagtttgaatgagacagctgagtgaagaagtgaggtaggcaattgcatactgatctgtgtctctgcaaagtctggttggagacacacacgtggaagctgcgaacgcatgtagatggagctgaagtcatgaaaagtggatgaaacagagtaatgagagagttgacaggatggagaccagagtgggggtggaggtgggacttcaagtttaaagttgcctggaagatgagaaaccagttgaggaggctaagatggagagtagggaaggcaggaggagaccaggagcgtgtggcgtcatggaagcccaggaggagctcggctctttacagaagagggtgatgttagttgtgacaaatgcggctgagagattgagtcaggtgaggccataaaagtgaccactggctttgatgacatggaggtcattagaggccatgacagaagtagtttctgaggagaggtggaagcagatgtatgtggtctagacagagtggtctaaggagggctggtagtgagaacgagggactatgcatagacaattattttgggggaattttcccacagagtgaaagagaaaaatggcagacatcattgttttaaaaaatgccctactccttcccaccactggaaatttgggcagagtcccttgcgtccctgcttgctgccggttccctagcttcctctctcctccctatgttctggaaagttcccccatctctgttctttacccaagctcaatctctcgtcttaacccaagttctctgtctttcagtagacatctcccgtattcctactacttctcaatccccttcttccagaccccagacctgtgggtggtaggaggggagagtctagtttttacaaaggcccactagggggttatctaaacaaaagggaattttctatccttggtcaataataatgtggcaaagctttgaaatgacttttttttaaccttttgtaggtcaaatttttgacagagttactgtcttcaccaagagtcccaataaacagaaggggagacggtagtagaaaaatatattttctgtctgttcatcacaaattccaggaatcatgtcttccttatttcttccctttgcaatatctttttattttttattcctttttttatagcattagaatcttttattttttcatgtggctatagccttcatgatgatcatttaaaacttttgtctgatactctattacactgatgtatcataattgacttccttattcctatatgtttaatttttacttattattgtgtcataaacatgtttatgctattatggtgtcataatgtcatctaaatattttgtataatgttccatcaagttgatgtgccatgcatttaaaaaaatttttgttcatttatttattttttagagacaggatcttgctatgttgcccaggctagttttgaacttctgggctcaagttgtcctcctgcctcagctttccaagtagccaggactacaggtgtgagccactgtgtccagcataatattttttcactatgcttatatttttgaacctggggttgctcattatttttaattacaaataactctgcactgattttcaccatgaaatagtattctttattttggagtatttccttaggataaattcccggtagctctttcagtgagacaaaaatgcacacaactttttatggctttgaacgtgcctccagattactttctgggaggattataacattcatcctgctgcactgtggtggaccagcttcactgtaccttccagatatgagcattttaatgaccttgatcttaggaccattaaattgtattttagaaatttgtttctggttttactgtgctatgaggagggaatttggttttgataaatgtctgtcttaagtgtctttgtaactgaatgtatattttttcatttttgtgtgatattttattttttaagttgacaaataaagtgtatatttaccatgtacaatgtgatgttgtgaaatacgtatacattgtggattggctaaactgagctaattaacatctgcctttcattgaatactttttttttgtggtgagaacacttaaaatctactctcagtgatgttcaaaacacagtgcattgttatttgctatagtcactatcttgtaaaatcaatatcttgaacttatttctcctaacagactattttgctataaaagattgttttctgaatattaaaaaaataacttttttcaaatattacatatatgatattggaaaggtcaaatagtcctacaaagattactttttaaaaaaacagtcctgctaaacatttcatgccagaaaatgccttatattttcctgctttagtctgcagtgtgcttaggtgcagaattccaggctggacgttgctgcacctcagaaccgggaaggtgccgctccatcatctcttcccacttccagagctgctctgagatcacgtctgatgccagtctgtctccagatctttttatctgcctatttttgtctttcccaattctgggagattttagggtccaattttttggttttgaagttgtacgatgaggtagctcgtagaggtcttcgttatttgtgctgggcatttgctgggaccctttaatttggaaggtcatgtgccttggctctgaaaaacaaaatgttagaggacttctatgcggattcatttccagttcattttcactttcttttctttttggaattcttcttatttaaatgttggacctcttggatgaattctctaattttcttatcttttctctcccattttccatatttttgtatttttctgctttctgggatattttcttaattttctaccttatcttccctctattggtagtttttttccatttctcctatcaatcatatctgaacttctcaaaagctcttttttgttgttatctctgcatgttcccttattaaatagcttcctattcttattatgtaggttcattatttttcttaattctgagtttattaaatatagttttcttttacatcttcttcaactcattgcattctctgttttctctaattctgtttcttctctgtttgctttgctttcctttttatttttatgtaagttgttttcctcagatgtttggtgatctttgactgtttgtatttaaaacaaagtactgagctggcagtggtgggtgcatgtctgtattcccagcaactaggaaggctgaggtgagaggattgcttgtgcctagggtttcgaggccagtcttggcaacataacgaggctatgtggtggtggtggtggaggtggtaagggtggtggtggtggtggtggtggtggtggtggtgatggtagtgctggtggtgatagtgatggtggtagtggtaatggtcatggtggtgatggtggtggtggagtggtagaggtggtgattgtggtggtgatggtggagatgatggtggtggtgatggtggtggtggtgacagtgatggtggtgatggtggtagtggtggtgaggtgggtgatggtggtggtgatggtagtggtggtgatgttggtgttggtggtggtgatggtagtggaggtgggggtgatggaaagtgggagataaatctggctgccagtgttctagaagcaagtagggaagggaatggagggtctcccctttcagaatgtgaacttcttatatagaccccttgttttcagtatggttgcctacttcagctggcctcatgcccaggaggtcatatttcctctagttcagcttctacagagacaaaaactgcttatttagaaggggacagtcacttgccgtccagggatgaggagggaaactaaatctacttcttctttctctcacatcgctctttgtaagcaattaggtttcagattttttctggttaagtcaattattactcaacgattccctttactgcctttgaatttccgtagacattttttttttcctgcaaaaagacttcttgtccatttaccctgttcttgtgaatttatccttttctttttaacatctttgttgtattgtcagtggggctctggtaagaagccaaagcaaatatctgttttcagcttctcatgattaactagaaactgcctgtagttttcaatggtcccagtcttcctgaaaaggaactatcatcccctgttattccattaatttctttccatatgttggttaatttaatttaatctatttttagttacataatttgagattaaggattttaatatctttgctctttttaaaaaaatagttttattgggatataattcacacaccacacaattcacccatttaaagtgtacaattcaatggcttttagtatatgtagagttgtgcaaccaccaccactgtctacttccaaaatactgtaatcatccttaaaagaaacccagtaccccttagctgtcaccccctaattcagccattcttcctgcctagggaaccactcaaatgctttcgttctctgcaggcttgcctcatctgagcatttaatgccagtggaaccatacaccatggggtcctttgtgactggcttctttcacttggcatcatgttgtcaaggcttgtctgtgttgtagcaggtgtcagcacttctttctttgttagggcagactactatccatggcacgaatggatggactgcattttacacatccattcctcagtggctgggtatttgggttgtttccacgttttggctatcatgaatactgctgcgatgaccatttgtgtatcttttgtttaatcgatttccaatacttctacagttgctgctttgtatcagaatctcttggacaattttaaaaaattcagatgcctgagttttactctagacttactgaccctaaattaccaggggagaggcccagggatctacatttgcaaaaagtcccttagttgattctgatgctcatttctgtttaacaaccactacactggagactcatttaactaatattcatgtatatgcttctccagaatgaatgtggtatcttatttgctttagttaagaaactcaaataggcagggaaattgtaaggccactttgttcctttccccattcctgattctctcctgcattcatcaatttggtatctctctttccacaagcaagacatctttttgtgctgtattttcaatgcctaattgttatattgtatgaaatctgctttttaaaaagacaccatggacattttattaatatttttaaacaacaatagtagtagcagtcgcaacaagaacaaactcttagccaggcattgtggttcgtgcctgtaatcctagcacttaggaaggtagaggcaggaggatagtttgagcccaggcatttgtgacctgcctgggcaacatagtgagaccctgttctcaaaaacaaacaaaaacaaacaaactcctagagggctagcaacttaacagatattgcgaagctccaaatgaaattccagccattaaaaaaagtaactcatataatagcattaatagatgtcaaagaaaatatatggataagtgaataatgaggctgacaagttcaagtagattgctccaggtcacaaggctcataatctgtagacctagaatttgatttcaacattttctgattattaacccagtatcctcttcactcccttgtgtttagggctacatttatagaaaacctatctacgcttaagtctattaaaattaaaaaactcatttgtcacatatatagataactatcaccccaatattttactctaaaattaataattaaaagagaagatccaaacattttttttctgccttttaaactagaatctataattcatacctggttgttgagagtaaactttttgttgtaggtcaaatatcgaataaatgatagaattagaaaaataacccgtttgccaaagccaatgtaataattgattacagcatagctaatgaatagataataaaactgggtaaaaggcattaggtgaatttgtttcttgggggaatcagttaaatttcctgtgctaaagtattagccccgccaaacattatttgctaaattcaaaggggaaaccgatctttataataaagagatctattggtcacagccttaacaaagtagccaaaccactgtcactactaatgggactcactgatatcaaatgctgcctgttgcaaacgtgaagtccatagtctcaccagtcaagtgttcttgctaaatcatttcacctgcatccaatccagtctccagctccaagttctagtctataaaaaacacagaggaagaggagcaagttaaataatatcacaaagaaagaatcagacaaaacaaaaatttggaacattcttcaagataactgacccagattcttaaaacattcagtgtcatgaaagaaataaataaaaagagatggaattgttctagactaaaatagactgaggaaatatgagaatcagatgcaattaatatgttttaagaggttcaagtctaaagaaagtaactgtaaaatatttattgcaggcaacttggggaatttggaaaggaattggatattagatgacattagggagttcttgttagttttcttagatgtgataaaaatactggagttacgtaagagaatgcccttgtttttagaagatgatactagaatatttaagggtgcagtttgataagacagatgaaaatgttagcaagtgttcaatctatgtagttcatctttaaaagcttttctttgtctttaaaattttcataatgaagagctggagcaatgcttttttttttgagacagagtctcgctctgtcacccaggctggaatgcggttgcgcagtctcagctcactgcgacctctgcctcctgggttcaagcaattcttgtgcctcagcctccagagtagctggggttacccgtgcccgccaccacgcccagctaatttttgtatttttagtagagacgaggtttcaccatgttggccaggctggtctcgaactcctgaccttaggtaatcttcccaccttggcctcccaaagtgctggattacaggcatgagccactgcgcctggcctggagcaataaggatttggagctaagcatatggcaatgttgtattgcctttgctcttattagttaaaagcccttaaaatgtcctagtcaaaacttgaggaggattgctctaaatggagaagaacacaactcaaataaaacttgtttcaaggcagaaagacacacaaatggcaaatggccgtgtccaaagttactatgtctaaagctgctttaagttttacagggaaaaaaacagactttagaaaattatgtggaaaagttagagcagatgaacttattttccagtgtgcagagtgtccaggatcaatctcatattttcagcaacaaaaataaaataaaataaatggttggaagttgatcaacatagatattgccatttttctttctctgagataatgacttgccattcatgtctagggacatcccacttcctagaccccttctcttgcatttctcctgagaagtctcagagttcacctctcttctcatcgaggcttttgtagtcctggtatttctttccatccataatctgtctcattcagcatgaaatgaagaggaactccagtggaaaagaacatatgattcagttagaaaaccttacatactttttacctgctgaccctgaatttgggggcaagatttttaacgttttcccagctataaaatgaagagagaaatatgaccacctacctcttaggggtatttgttttataatttattctttcaagagaatttatttgcgtacatgctgggccagacactgggctggttgattgaagggactttatggtctagaggaatagttagatgtgagcattctgtaagtagataaaataactgtctatgtgaatatggagatggtccaccaatctcaggccttatattaagtctccgaaaagagttgatacctcacttggtattggaagatttagtaggagctcagtaagtggaaaaagatagtcaagacactatgggaagatggatttatacactaaggcaatgaaatttatgagagtatgtttcattcagtgaagtcatactttggatggaatcagaggtttcagtagaacccaggatatggaagtgggtaaagataagagctgaggcaagaaaagttagtagggatgatattgtaaagggccttctgtgtctggacttttttcttggcaatgagaatgatgggaaaaggtcagtgtggagtgatttacatttcacaaagcctctgactcagacagcaacacagaagattgttagagataagatgcagaatctgggactatatctttcatatttacatcctcagagccaaatacagctcataactcgtagtaggtgttcacctctgaaattcgaggcaataattaactggggtaccaaagtcaatgaaacactccggagatattcagcaccattcttcaaattgaatgtaaatgggacaggtttgtttattgtaacttgctattttaaaaaaaattatattttgagatctatttatactaatacgtataaatctatttcagcctctgctgtgttttatcttatctcatttttattttaatatctaatctccgtttttagatcctaccctgatttgtgctcaggtactgtcatattatataaaactcttgttttgtggaagaaagggatggccacaggattatgaaacctggcctagagatacctaagaggccgtccagtccagattcttctcttctgagagaagcaacatgaagcccaaggagcttaagtgacttgtacaaagaaccccgctaattagcagtacagttcgtgctagagcctttggtgctgtcagcattgcttaggttgataggtgtttatactgtgcgcagggacagagtacttccagtatcctttgaaaagacgacatctgatttatggaaacattacttatcacggtgtcatgttgtagtaaacaagattgtggaaaggtgtcagcaaggaaaattaatctcactcaagctaaaaataggtactcttgacaattatgtagaaaatgcatgctcataaaacgtatcatcatatgcagcatcattgcttttagaacatttttcttgtcttagacaggctgttctaggccaaggaccagaccagttttcccaagagggctttgtaagtaagcattggttccataaagtcaaccttagttctttaaaagcatgtggtcatatctgattaaatgaacatcattcttaataggacatggcaggcaggacctaggttacataaccaatgttttcaattatgccctggcaagaaggaagacagattcttgttgaagttatgcaaataagtatattgccaaaaaatatatatgtattctgattgaataagcagattcaataagaatttttgaactccagaggaatcgggcagggagaataagaggtcatttacaagtgattcatttcagcttacaaaagcagaatctacaacattattatgatgtatggaaagcttaagagaaagcaaaaagggcttccttatatataaggaaaataagacattaaaataacatcaacagtattccagacaaaaattactatcatccctcaccaattcatttaatcctatgtaattaattcctattccactggatcttgtggatcttgggttagtcgtctaatgaacccatctgcttctcaacaaaagttctggaaaatttgactaagtccacggatatggtctcaaagttgttttctttttttttttttttttttgagacggagtctcgctctgtcgcccaggctggagtgcagtggtgcgatctcggctcactgcaagctccacctccagggttcacgccattctcctgcctcagcctcctgcgtagctgggactacaggcgcccgccaccacgcccggctaattttttgtgttttttagtagagacggggtttcactgtgttagccaggatggtctcgatctcctgacctcgtgatccgcccgcctcggcctcccaaagtgctgggattacaggcgtgagccaccacgcccggccggtctcaaagttctttaagcaatgccatcagaaacctgaacccaaatgtatttaacatataaccctttactgtggggctctgagcagtcattcttcatgaaagatgaagcatttttgcttgtagctcattacaaataacttcagggaagcatcaaagcaaaacatgctaacaaaaatatctgtagatgacaaaaaacttaaaatgggtgccatttattcattgcttataattttcaaaagtgaaagtctagaaagtcataacaagaataatatatttgatgagaaaatttgttgttttctgtgacatgcaaaacgaaactataaaatcaaccccccaaattttagacaaattacttataaacataatcattaggcctatttcaaagaatacagaaaacattatatctaatttacaacaataagtgggcatagcaaaaatcttgatgtaattattcagagacataatatactctgactataccaagcatatgataagaatatcaagaaacaagatgtagtaggtctggagtaggtcctaaacatctatttattaataaaactgtatgagtatatgatgggaattcccaatcgaaaaacactgttgtaaaacatgctagattcagattaaagaaggatcaagttaacatttaaaacaactgaagttatggttgataacttaagcacctgttgtctgataccaggcaaaacaacaatataatcaatgtctttttatttttattttttattttttgagatggagtctctgtcacccaggctggagtgcagtagcacaatcttggctcactgcaacttccgcctcccaagttcaagcactttcctgcgtcagcctcccaagtagctgggattacaggtgtgtgccaccacgtccagctaatttttgtattttcttagtagagacggggtttcagcatgttggccaggctgatcttgaactcctgacctcagataatctgcctgccttggctttccaaagtgctaggattacagatgtgagccaccacatccagcaatcaatgtcttttagtacattaatttagtcaggggaatattattatatcaatgaaagacatccagttatttaggcaattagatttgcccttaattgacagagatatacacagccataacaatgtttttttgtttctgttttttgaggcaggttcttgctctgtctcccaggctggagtgcagtggcctgatcacggctcactgcagcctcgaccttctgggctcaagcgatcctcccaccacagcttccctagtaactgggaccgcagatatgcaccaccatgcctggctaatttttgtattttttgtaaagacagaatttcaccatgttgcccacactggacttgaactcctgggctcaagtgatcctcccaccccagcctcccaaagtgctgggattatatacaggtgtgagccatcatgcctagctgtcatagcagtgttaaagtgttacctttacagattgctgttggtgtgtaactcctcagtgccaaagcttatacatcccagcgagggctgtccttctcatgggaaccacattaggaagttctaacattccaacagccagacaaacattgctcaaaagaggtttcaaatccctctattagagtcatagtaacatcttctattggaagatggattttcttgtagaacacatttcagtctaatgaataaggcagggataatatatctggatcatgtaacttttggccaaaagtgacttgtgatgaaaagttttgagattcattttccggtatcactagcgagtgcctattgaaagcatttttgagtaatggcaaaatatttaagtaagtgtggcatttcctggtgacctgaaggaggaaggccaaactggacagaggacaggcgacttcacttgaaggagtacaaaaggaagaagcagaaggagctttggaggaacatttgttgagaagcataaaagatatgaatttggagcacaaaattcattcaaaagatgttctggaattttctaatttgaaactacaagatgggtccttactgcaggaaagggtatgatatctcaccaattcatttagtcctgtgtaatgaatcctcattccactggatcttgggctagtagtctcaggaagccatctgcttctcaactaaagttctggaaattttgactaagcccactggtatggcctcagttctttaagcaataccatcagaaacctgtactccaaagtttctagcatataatcctttatgacaggcttctgagcagtcattcttcacggaaggtgatgcattctggcctgtagctgagcagagctgagcagtccgacatgtaacttcattgagaaccagaccgcagagttcaaggaggccttccagctgtttgactgaatgggtgatggcaaggcccttacagccagtatggggacatgacgagggccttgggccagagccccaccaatgccgaggtgctccaggtcctgggggaacctcaggagtgatgagatgaatgtgaaggtgctggactttgagcacttcctgcccatgctgcagactgtggccaggaacaaggactagggtgcctagttttaggattatgtccgagtccaaggattatatggaaggtctttgggtgtttgacaaggaagagaagggcaccatcatgggcgctgaaatccggcaagtccttgtcatactgggtgggaagatgacagaggcagaagtagagatgctggcggccgggcatgaggacagcaatggttgtcaactctgaagagctcgtctgtgtggtgctgagtagctgggcacattcccagcatccccccagccctgtcctttgccctgtgagacactgtgtatctagccccgaaggctttctggtcacagcacccttcccatcttgtctcttttggataatgcttgccatgagcattcaccaataaacttgttctctgttccccccaacccaaaaccctcaaacaaacaaacaaaaactacaagatgagcaacagagagaatgaacagtgttcaggcctccattcaagaagaccagagggaagaaggcatcaaacataaaataaaacacaaagaaatagaaattgtgagtgaaaggtacaagtttgcaagtcagatgctagagacctgatatgtgcacgagaggagttccagaaacaacaaaagaccagatggaagagggctaatcattcgagagatgccagggtcttccagttggagatgctgctgcagccccctccatccccttatcttatgactgcaggaaaaccagaaagggtgctgcctgaggactagaaactatgggagaatccctgaaaggttagaaagcaaaaacatttggtttgaagaaggaaatcaaggtccaaatgcctgtcagagatgggagtggctctgtgggccctgcacagcctcagtggtgtgttccagttgcaggaagggcctgggcatgggcttggagcttgaaaggcagagcccacttccatcctgctcttagacctggcaggggtcaacacagtggtcaacagagtgatcaacagggcagggcagtgagcactgagttgggtggggaggcacagcaggtctgagggaggtattcttactccagagggacagagagaagtttagatactggcagtcagcctcaaccctggctgcacattagaaatctctggggagctgttaaagctattaggttggtgcaagagtaattgcggtttttgccattaaaaatagtatgccagggctacatttgagagcaattaagcagaagcttcagtcagggagctcccaggtgaacctaatgttttatcaatgtggagagccacttctgtaaaggaaaacattgaataatagtgaaatcaagaattgtaaactatcttggaaagatctaggagttctggtatcactagtgagttcatcactgtggatggaactatgtgagaaaggagatataggaaaatatccattacaaggattctgttcatggatgagggtatggagaaaagaagggaaataagtgtaagtgttcgaaagggcgcatctcaattgcaggtgaactatcttgatgggaacccatgtattgtgtaactgtgaatgttaatagagaattatgtttaatgatgactattatgaataggaaactaaacagtagtgagatagagaagcatttcagaacatttatgttaacaaggccgggaggcagagctgaggaaaacagagtgaagagaaactttagccagcaatagtaaggaaagggaaaaagcataagagagaagacaggctgtcatgaattaatacagcagaagcatttgaactaactatatcagttgttctaataaatttgaaaaggctaaaattccctggaagaaaagagacgatccgtttggatttttgcacagctgttctgcagttgagaatatctccgaccatgattgtgcattttctgttcctccctttaatcctgtcaatttattcttcttgtattttaaaaatttatattattaggcacatttgtatttataattgttacagcttctgtaattatcagctgtcttttacaatttctggtaacgccctttgtctttatatctgtattatataaagctactctagatttcttatgcttatggtttgcctgggatagtttttccatcgatttcctttcaacttcctatgtctttgtttttataatatgttttttggagacagcatctgattgggttttgtgcatttttttttttttttttgagacagtctcacactgtctggagtgcggtggcatgatcatagctcactgcagccttgacttccctcccaggctaaaatgatgcccctgcctcagccacctgagtagctgggactacaggcatgcaccaccatcctcagctgatttttaaattttttatagagagagggtcctactagttgcccaggctggtctcaaactcctaggctgtagtgatcctccctctttggcctcccagagtgctgggattacaggcatgagccactgcacccggctggtcttgagcattttaattcatcttgataatctgttataaatcagagtatttagttcattaacaattaatcattgacataattgtgtttaggtttactatttctttattttttctattggcctccattttatttatttatttatttattttattttttatttttatttttagagacggagtgatctcggctcactgcaacctccgcctcccaagtacaagcgattctcctgcctcagtctcccaaatagctgggactacaggcgggtgccaccacactgggctgtttttgtatttttagtagagacgggggtttcaccacgttggccagactggtcttgaactcctgacctcaagtaatccacccgccttggcctcccaaagtgttgttgggattacaggcatgagccaccacgcccagccccatttcaatttttattatttaaaaatacaatttccattttatttttctccagagaatagtttttcttcagtcttctaaggcctcagctacttacatgggctttggtgggggtcgtggggcagcacccgcaggtctaagtaggggtggaggtgttcggtccttgcaagcttcacgagattgattcctcactactttgctttaatattataaactgcacaactcacacagtaatgtaacttcatatccagcttgggaagcacataggtgtcgaagaagcttgcttagaaatgtccctgactgctgtggcctccactttgtttcaaatgacaaatttcttaatggccttgttcttgggcacacatcaggtatagttcgtgcagcaaataggctacacgtggccatggccctttttggtatgacctttgttccttcttttatttgtcatcttggaggcacagactggagctggtctcccatttttattcctctgttgtatgcttttttgctttcttttgggctttatgaatgtgttttagacttcctttttaacttatctattgtatttttaactatgcctcttggcattatttggtagtggttgttctagtggctataatatgtatgtattttttaagttttttatttccataggtttttgggggacaggtggtatttggttacacaagttctttagcggtgatttgtgagattttggtgcacccatcacccaagcagtgtacactgcaccctatttgtcgtcttttatccttcacccccttcccaccctttccccctgagtccccaaagtccattgtgtcattcttatgtctttgcgtcctcatagtttagctcccacttttgagtgagaacatacgatgtttggttttccatttctgagttacttcacttagaataatagtctccaattccatccaagttgctgcgaatgccattaattcattcctttttatggctgagtagtttcccttggtgtgtgtgtgtgtgtgtgtgtgtatatatatatatatacacacacacacacacaccacattttctttatccacttgttgattgatgggcttttgggttggttccatattttggcaattgcgcattgtgctgccataaatgtgtgtgcaagtatcttttttgtataatgacttcttttcctctgggtagatacccagtagtgggatttctggatcaaatggtagttctacttttagttctttaagaaatatccatactgttttccatagtggctgtactagtttgcatttccaccagcagtgtagaagtgttccctgttcactgcatccacgccaacacctatattttttgattttttgattatggccattcttgcaggagtaaggtggtatcacattgtagttttggtttgcatttccctgatcattagtgatgttgagcatttttgcatatgtttcttggccatttgtatatcttcttttgagaattgtctattcatgtccttagcccactttttgatgggacgttttttcttgataatttatttgagttcattgtagattctggatattagtcctttgtcaggtacatagattgttaatattttctcccattctgtgggttgtctgtttactatgctgactgttccttttgccgtgcaaaagctctttagtttaattcagtcccagctatttatctttgtttttattgcatttgcttttgggttcttggtcatgaaatccttgcctaagtcaatgtctacaagggtttttctgatgttatcttctagaatttttatagtttcaggtcttagatttaagtccatgatccatcttgagttgatatttgtataaggtgagagatgaggatccagtcattctcctacatgtggcttgccaattatcccagcaccatttgttgaatagggtgtcctttccccactttatgtttttgtttgctttgtcaaagatcgttggctgtaagtatttggtattatttctgggttctctattctgtttcattggtctatgtgcctatttttataccagtaccatgctgttttggtgactatggccttatactatagtttgaaatcaggtaacatgatgcctccagatttgttctttttgtttagtcttgctttggctatgtgggctcttttatggttccatatgaactttaggattgttttttctagttctgtgaggaatgatggtggtattttgatgggaattgcattgaatttgtagattgcatttggccgtgtggtcattttcataatattgattctacccattcatgagcatgggatgtatttccatttgtttgtgtcgtctatgatttctttcagcagttttgtaattttccttgtagaggtctttcacctccttggttaggtatattcctaagtattttatttttttgcagctattgtaaaagtagttgagatcttgatttgattctcacttggtcactgttggtgtataggagagctactgatttgtgtacattaatttcatatctggaaactttgctgaattcttttattagttctaagagctttttggaggagtctttggggttttctaggtgtataatatatattcttaacatctcacagtctacttagacttaatgttataacactttcatgtaatatgtagaaacattgccatcatatgcatccattgactgtttcccatcctttatgctatacgatcatgtgtatcacatttccatataccattaactctactatgtaatattcccattgaacagtcttcttcctcttcttcttcttcttcttcttttttttttttaagtaggaggtaatcttttgtgcttacccagacttttaaatttctgatgccttatgaagagtgaagtttccatctggtgtcattttctttcagcccaaagaacttcctttagtcctttagcattgtttcatagtgaaggtctgctggcaataagttctttacttttcttttatctgaagtgtctttactttgctttcattcttgagggatatttcaccggatataagattcttagttgacaggtttttttcctttcaacaccttggatgtgtttttttcccttctgtcttctgatctccatagtttctgatgagacatgatcttgtttcctgtagatagtgtatgatttttctctgggtgcttttaagattttcattttatctttggtctgcagccatttgattatgatatgcctacctatgtttttttttgtgtacttattattattggggttttctgagagtcttgaatctatatcatttaccaaatttagaaaattttcaaccattatattttcaaatattatttctgctccatttgttttcatttccccttctggcactctaattacatatatgttaaatcttttgttattattccacatttccctaaggcttaaaattttttcagtcttgtttttctttgatcttcatattggataatttctattgatttattttaagttcacttatttttgtatttgtcattttcattctgcatccagtctagtaatttttttatttcatatattgtatttttcaattctgaaatgttacacttgtttgatttttttaatttctatttttctattgagaatcagttgtttcgttcattgcaagcatgtttgcctttacatctttgagaatagttttaatagctgctttaaaatccttgtctgcaaattccagcatccaggtcttttctgtgttggtcttcattggttgtttttttctcttgagaatgagtaacattttcctggttccttgtatgttaagtattttggatggtatcttgaacatagtgagtcttgtgttgtggagattctgtattttgttacattcttctgaaaaacattgactattgtgtttgtttcagcaggcatttactttgttggacccaaacagcaaactctatgtttctagtagcagctatcctattacttaggatactttcagttgtaccaagatcaatctcagttatgaatcagagggtaaaagtctctttttttttttttttgagtaaagatcttgctctgtcacccaggtgggagtgcagtggcataatcatggcccactgcagcttcagactcctgggctcaagcagtcctcttgtcttagcctcccaagtaactggtactatgggcatacatcaccatgccttgctaataaaaaaatttttttttgtagaggaaggatcttgctatgttgcccaggctagtcttgaacccttggcctcaagtgatcctcccatctaggcctccagagtgttgggattacagatgtaagccatcatgctccttctgaaaagtctaaataaaatattagcgaaatatattcagaagtgaattaaagataattcaccatcatcaaacaatttattcagttgccataattcattacatgaactgattaatggagaaaaaccatatgattgcacctataaatgccaagaagatattcgatataatttatcagatatttctagttaagaatggattaaaatataagtagaaagaaacaaaacataaaatacatttatcagaaggtaattataagtatcataatgaaccatgcaatactgaagcatttctattaaaattagaagcaagataggcatgcctgtcatcaccatattattaaacattgttttaggagccgtagttattgtaataatgtaataatgtgtaataagtcttatgtatataagacatggataaaatttaaaattatctttatttggccgggtgcggtggctcacgcctgtaatcccagcactttgggaggccgaggcgggtggatcatgaggtcaggagatcgagaccatcctggctaacaaggtgaaaccccgtctctactaaaaatacaaaaaattagccgggtgcggtggtgggcacctgtagtcccagctacttgggaggctgaggcaggagaatggcgtgaacccaggaagcggagcttgcagtgagccgagattgcgccaccgcagtccgcagtccggcctgggcgacagagcgagactccgtctcaaaaaaaaaaaaaaaaaaaattatctttatttgcatatgatataattgcatgcctaaaaatctttaaaattccagtgaaatgcattagaattgataagatggtttcttaagtttctagatgaaagaaaaatatacaaaaatttgtaggttttgtttacatcaataattataagtagtaagttaaaatgtaagaaggaaaagtatcccattcatggtagtgataaaaatctgtaaaatgtttaggaataaatttatcaagaaacatacagggcctctgtgaagaacatagtttaattttattctgaaggacactaacaaatactgaagaaataaacctgcagtgttcctggatggaatgatttaacaataaggaatgaaaattttctaaattaataaatgtttagtgctatttcaatcaaaattctattttttaatttttggaactaagaaacattatcttaaaatgtatttggaataataattgtctgagaggagccaagaaaattttgaaaaatactttgtgtaacaacttgactttccaaatattaaaatatgtcctctaagctacagtgataaaagcagtatattggtcttggaactaatacatgtatttatatgtatatctgagaatatatttatatttatatgtttatataaaatattttaatttttattttcattgtatcagtatttatatataggatagtgtagaaacatcaatttatatatattatagtaaatgacaaatatataatctgaatgtaatgggaaatgatgatttatatataatatagacataatttgccatctgtctggaagaaaacaaatgtagacgtcgactttacattatatgctaaattaaattccagatggattaaagctctagatattaataacaatataaagtaatagaagcatattttagagaataaaagttagataaatttgcccataaaaagactaaaaactaaaaaaaatacaacaaaatctgtaaaaactgtagactggaggaaaacatttgtaacatgacaaaggactaaaatttttaatatagaaagatactctaaaaatttatagtaaagcacaaacaactcaagtaaaaatgagcaatgcattcactgcaatgtctacaaaaaagaaaaaaatcaaataaaatgggcaaaacatatcaagacaattatttgaagaggaaatagaaatagctaaaaatttataaaaaatatgcccttatttccaataatgataaatgtataagtgaaaccaaaaatgaaattctattttcttctcaacatattggtaaacattagaaataacaatcatcttcactggttatgaggataaaggagaaggagacattcatatatcgctgtggggatatgaattgctgccacctttttgaaaactaataagaatagcctcaccattttattcagtttagtacagtgttatttgtggtggaagaaacatataaacatttggaacacccattgactgggaaatgtttgaataaattatcgtatatttaatatgaagcagatgttaaaaagaatgattcaataggatcaatcatatgaattgacctggacaaatgtccatggtacattgagctaaaaatgaagttgtgcatactgtgttcccatttctgtttcaaaaccacaaaaataaaagaaaaatgacaatcaattcccccttaaaatagcttttatgtattaggatgcagaggtaccgtatcacatttttaatactgattatcacaggagggtgggattggagggtgtgtgtgtgtggcttaatttgctcccatgagcttgcagagcctctgtaataaaaataacctgatattttaaaaggctgggacccattttgtaagttaaaagagcatcagggaggaggtgtagacctagtccttcccctaactcacaatgtgacattttctgcctttattttcctgtctctgaagtgtgggtggtaatgactgccctacctacttagtgaagattaaggatgaagagaaatatagtttgaatagttaagacattgaaatgcaagctattatccttaagaaaattctcaaacactctcactttacataatgcgggtgacaaaatcacccaaggaagcatcgtcccttcccaatggtgatgtagtgggagaggcactgagcaccacagaggtaaacactggtgtctcgagccatcgtccccatgcccgtttcctcaaaatgtctacttggtcctaatctctctctctctctatccatccacctgtccatctatcatctatctattatctattcatctgtctaatcaatcatctatcatctgtatctatccatctgtattagtctattttcatactgcaataaagaactgcccaagactgggtaatttataaaggaaagaggtttaattgactcacagttcagcatggctggggaagcctcaggaaacttagtcatggtggaaggtgaaggggaagcaaggcaccttcttcacaaggcagcaggaaggagaagtgctgaacgaagagggaagaaccccttataaaaccattagatctcgtgagaactcactcaccatcatgaggacagcatggaggaaaccaccccatgattcagttacctccatctggtctctctcttgacatgtggggattattgacattatggggattataattcaagatgagatttgagtggggacacaaagcctaaccatattatcatccatccatccacctatctatcatctgtctatctgtctatctatctatgtctgtctgcctgcctacccatctgtttgcccatccatccattcctccgtctgtctgtctgtctctgaacattatccatccatccatctatccatccatccatctctccatccatccatgcatccatccatttatccatctatgtatgtttacctgtctactttatctttctaccttatctatcttcttaatttttaatctctaaaattataagcctccctccatacaagcaatagaaaacactgtgtaaagatagaattcttctcctcatcagcctgaagtgggtgaactgaaactcctcacttaggcagtttgttaccctgcaatgcacataggttggatctttgacttatcccagtcggcattttggagtttggagatcctatgctctagtcgctaagtgacctaatgagtgggcagtctatgtttgcttcatttatatactgtgtgtctaaataagaaagccacagcatatgtggcctgtttttttttttcttttttctgtttttgagctcatatcctgggtttcctttatgaccagggatcagagaaggctgaagaaggtggagaaactgaggcacaaaaagagggcagtgaagatgtgggcaacctccctgaagcccaggagaagaatgtgagttttcgctttttcacagcagtttgactggattctctgctgttcgagacttttacagggcttgtacaacttgactctgggcacaagcagtcagaaagagggcaaggagctgagagtttagccagggaggaagcaagtaatttctactgatgtgttaagcactggaatcctggtgcagagagggctaaagggaagacaaaggagcctgaacccagaccaggagggagccggctggacaaggcttggagaatttgttgtggtggtgttatggctaggttaggtgtatgctctttataaacaagggacctttctgcttgatcatgattaatgacagactcctagcttacacccacccaggagccctgcccagtggggaaatagagctaagggagtgcagtatatctggcggaagacaagaggaacttgaggataaaaaggactccttggggagggaaattgacactcagttaatttaagttcaatcagggaaatagcagatcttggtgaagtcacatgattaattctaaaggggttcccatgcaggagcagcagggtaaggagtgggcaatgttgggggacactgtggttctgtgagtgccaagctgacataataggggatgggatgggccacttcttcaaggagttctgaaaatgtgctgggaaaccaggcgccaaggaaggagcctggtggggctgggaatggggtgcaggcattgttctgggcctccttagaggagaatgttagagggcttctccactgggtcagttgtagcaaagactatttttcaaaccctgatggtttgctaatttatttattctgggagaggtgtgggagcttttatgagagctggatcctcattcaccagatagaatgtggctagaaaggggctgagacccacacccacgctatggaaaaaggggtgtggggctgggcatccatttgtctttacctcaaagaacttaaattgggaggggctagggaaggaaattccctgatatttagacttatatttgaagtagactgctatttcaaaatgttgatattacaactctgaagtttttgttttaaagaaagacaaaatcttcaatcttgacctagaagttagacggtgtttcatggcagcctgtataattcagaaacaatactttaaaaattaaatatagtgaccatttcattatcttgtaattaaaacataatctgtttcacaatttgaactttgcatgagttgcctaatgcacccttacagtcatattgatgaatactttgaagttgagtttgcttcttttaagacatagagacaaagatgaaaagcattacaccccagcccctttctcccgtgagaccagcaggaaggtagcatatttataatcagatcctgcctcctatagccagggtgggctttgcttcagcttctcagccactgggctgggttagttctgtgaagtgatgaatcacccagcttggacgttctctttgctactacattttaaaattgtgagcctttgacaaagtcaattataatcttgtgaatcctggtaggaattaaaaaaaccattttttgttatttttgtgtgggctatggtgaagaaatgaccgtaagtgaaaaatatttttattttatatgaatatattactaacatcatattatcaaatttacttttcaactctttaatgccatttatcctacagaaagacagattctgacttcttcctgtttgaaaaccaacacatgctctttgatttactttaattcaattaaattagaaaaaccctctgtgattgtcagtaaacagatgaaaaatgttgtaaaaacatgattaacccttatgagtgtatatgaaaataggctgaattttaaaatttaagaaggagacaaacaccacttagatatttagaatgcttgcattttgtgcttcaagaacctactggcttgttttgacggtctctggtttgttgttaaaagctgagatggggccgggcgcatggctcacgcctataatccctgtactttggaaggcagaggtgggcagatcacttgaggtcaagagtttgagatcagtctggccaacatggtaaaaccccgtctctactaaaaatacaaaaattagctggctgtgatggcgcacgcctgtaatcccagctatttgggaagctgaggtgggaggatcgcttgaacccgggaggcagagtttgcagtgagctgagatcgtgccactgcactccagtctgggcaatagagtaagaccatctcaaaaaaaaattgctgaaatgggaggacattgtgggctatttgtaaaggcatctctcctcccagggcaccccaggcatagacaggctgacagggaatcagaaagacaagggagagctctgtgtgttttgaacattgattttgaaagtatgagacacatcctagtagtttcatgtaggtatgacacctcagataaatccaaggctttcaaactcctggctccgttgaaaccatcttgaggctatttctttttgctcctcttggcttgctgtggttaaaacagaggtgctcccctgggcttccctcattaaccaacacgctgcggtggatataaagtttagaatattcgtgggcccacatttggttcctaagactcctgggcaaggaatgtcagcttcctttattgctttaaattccctctatctgctccatgtgcccacctcatggctggcaggagcttccagctgggtggggtgttttgaagaccctgtcctcctgagggtctcacagccatcctggggtcgttagtggtgactgggcagggattgggtgctggttgtctgtggtggtgtttctgctgtctgtcccttggcatgggccagaccctctgttctggctggacacagactggcctttcacagtggctggccttctgaccgcggacgctgctgcctgtacagagtgccttgtgttacttaaatgccccagcggtccctggctctgtttctgtgtatgagcagggcctgggcagtacccctcctggaaaatccttctttcctccccagtctggccacctccgtcttgccaattccaagctctttttttttttttcctcagggaccgcctagctttatcaccccattagcctaaggttttgaaaaccaaggtctatactttcttccttaggggtggaaagccagaacaaataggtcgcctgtgggaagagaaaataactcttactctgacccctctaccccctcagctttgtgtagcagaaagaacaagtcacaattcatatcctggccttcagccacacttattatgagaaggaataaaaacagttttaaacattttattctgaaataactatagactcacaggaagtttcaaaaataagagtcttgtgtgcccttcacccaacttccccaaatggtgacatctcatctagccttaatgaaaccagaaatgcaatgcattggtgcatttctgttaactagatgacaaaccatatcaagtttttaccttttttttaaaaaaacctgccttcatttgtgtgttaaaaacaattgtcatgtgtgcagtaaaaacacaaaacgagcaaaaaacctctctccagcacctggcaatgttcagttgagtgataaaccaggtaaatgcctaagtcagggacaggcttatctgatctctgctatgaaacatgcatactcaatgcacacttgtaggcactcatacaattccatttaatggagaggaatatttacctaatgtttgacattgattaaaaaaatcaacagaaatggaaacaaaaactattatcttctttaatgatatggacttcccctgaccacctcctcaacttccagggttcttaaagacaagatgccaagatgtaaattctgtccttgataaaggattgaggcaggaggacttgggaggtcaggagggtgaacaccgaaaagaccatgacttcatgcctaggaagatcttacctgtaactttagaaaataggggacctcatggggcctggcctgataacccaggggagggtgaggggctaaggaaccggcgcctcaggagtaaaggaggaaaacagaaagtcagctcagcttctgggcattctctaagaaatgaactgcagactgggacatcatgagagctttagaaaatgctggaaacattgcaccttgtgcaggtttggtttgtgttttttgatcaaggtacaattatttaaaattgtatgctttgtgaacccagtcatcctatctgaaagtcatgaggcccttgcttgacagataacatgattatggtctgtaaccacccctctctggcttcctccaatagcagtcttgagaaaagtttcaaggggcaaacattgatgtaggtttgtgggaggagtcatgggtctcagcctgggtccctggagtgcctgcagctcgagaggactctgcctctgtcctctcatctctagccgctctgaggctggctgcccttgcaggtcacgctgggctagtccttcactatctcccacacctgccacctgttcccagtgaacgctgcctggcactcaccaccacggacacctgtccttagttctggccacgcaccacctctgcagtctgcttttctggccaagtttccaacaaaaatagctgctgtggaaggttctaagacttcccacttctgaggtttctctcttctggctttctctgaaaaacaaggtgaaattactttaaggtgtatgcttcctcaaatggtgattatgtgagatcttggcttaattgactggatgattataattatcttaaaaaaatgcttttgtgcctataattacttgccagccgtgaaagtcaattcaagcattttacatagataacttttaaggatctgcctaattccagtattttataattctatgaaccaaggttggaagcttaattattattatttttatttatttatttttagagacagagtctcattctgtcacccaggctggagtgcattggcataatcatagtgggctcgagtgattcttccacgtcagcctcccgagtagctgggactataggcacaggccaccacacccagctaatttttacattttttgtagagatggggtcttgctctgttgaccaggctggcctcaaactcctggcctcaagtgatcctccctcctcagcctcctaaagtgttgggtttacaggcatgtgccaccacgcccagccattatttttaaaactaatatatcccacctcattctatgggggatttgaagctgagctggagtagcattacacaaatgcagtcattcaacattttatgggcagattgagtgctgccacttgccaggcaggactccagggactgtggagggagcagtgaaaatgacagagtcactgcccccacagagcttatgttctggggaagcttgtggtggtaatacccaaagttcttccaagcttacttatcctttcgaggctaagtatttttatgcattctctgagcaatcacttcccctgagcaatcactttccctgctaaacatatcttttaagaaattaaggtcaattcagatattgataaagagtgctaggagccagatgcggtgtctcacacctgtattcccagcacttcgggaggctgaagcgggtgaatcacctgaaggtcaggagtttgaaaccagcgtggccaacatggtgaaaccccatctctactaaaaatacaaaaaattagctgggtgtggtagcgggtgcctgtaatcccagctccttgggagcctgaggcaggagaatagcttgaacccaggaggcagaggttgcagtgagctgagattgcgccattgcactccagtctgggcaacgagagcaaaacttcgtctcaaaaaaaaagagtgctaggttcctccatagttgttgctagctaactataaaagttgagacttacattcctataagacttcctactgccccccaggctagctctacggttgacagtatctggttaattcatttgtttcaactgaatataactaataaaaataattggattcagaagaatgtaaaactctacataaccaataattctatggtacatataatgaattttattctgatcctatgtgaagaagaagaaaatcaaagttctttgagatccaaagagttactaacagatttcatgtgttcttctatccaatcactaacacctatttatcgagcttgcctgttggttccagaaagtggcctggaggggccagacagttcccagagatccaaaaatgaataagacacaggttatgcccccaaacacacagactagtgagggagacagataagtaaatgatgattatgggagcaagtgagaaggtccttaactcaaccttatgggttaggaaagtctccttggaaatgttttgagcatatcctggaaggtgtggccaatgtgagaaaattgcatgtgactcagaatggctgaagtagagtggtgagggatgaggccagaggggtacacagagccagatggccttttcactgttctaaggaggtgtattagtctgttctcacgctgctaataaagaaatacccaagactgggtaatttataaaggaaagaggtttaatggactcaccgttccacatggcgggggaggcctcacaatcatggcagaaggcgaaggaggagcaaagccatgtcttacatggtggcaaacaagagggcttgtgcaggggaactcccatttacaaaaccatgagatcttgtgagacttactaccacaagaacagtatgggggaacccgcccccctgattcagttacctccacctggccccacccttgacacgtggtgatgattgcaagtcaaggtgagatttgggtgggtacacagccaaaccatatcaggaggatagagtatcttgaggagatggaagtttctaaagatgagggtagtacagtaaggttgggtgctttttggaacgatctctctggctgcagtctggagcacagattggagatgagaaagaaaagaggaggtgataatcactctttaggagcttccttcagcaacccagtgagcaaagatggtggtcatggcagaggaggggcgagacatgggcaggattaggcaggattaaagaggcacgatcaacacgtcgctgtgaaagcaacccctggattttgcaacaagtgccagactcttctcctgcacattatttgagcaccaaaacttggggtgtcaccagtggcatttaacgtaaaggttagtttgaagattcccagtgctgaaaaagtcctcttggcctgattcagacctggctggcactgtcaggctttcaagttcagtgcccgtctcagaaataggaaggtattgttctggaaatggctaaaaacatgaagttgggccaggagatgtgggagtgtgttggatgctgtataacttgccttctgtgatatttatttatttatttattttagatggagttttgctcttgttgctcaggctggagtgcagtggcgcaatcttgactcaccgcaacctccgcctcctgggttcaagcgattctcctgcctcagcctcccaagtagctgggattacaggcatgcgccaccatgcccagctaattttatatttttaatagagacggggtttttccatgttggtcaggctggtctcaaactcctgatctcaggtgatctgcccgccttggcctcccaaagtgctgggattacaggcatgagccactgtgcctggcctaccttctgtgatttttaaaattttactttatagacaaggtcttattttgtcacccacgctggagtgcagtggcatgatcatagctcacagcagcctcaaactcctgggctcaagtgatcctcccgcctctgcctctggatgcctggctaatttttaacatgtttcatagagatgggggcgtcttgctatgttgcccaggctggtcttgaactcctggcctcaagtgatccttccatctcagccttccaaagagctgggattacaggcatgagctgttgtactctgccaccttctgtgattttgatttttccattattaatcttgagaggctgcctggtagtgtaacaaagacacttaattaggaatcagtagacttgcagtgagtcctgattgtgttgactccttgtcctgtgacctttgactttggcaaatgacttccctctgtggcctcagtgtcctcatctgtataaacatggtgctgggtagagaatgtatatgactgcaagatcacattcagtgccccccgtccatgattccctgagctcactgcctgaattgtaaggcattaggaatttttagggactgctctcaagaaccacatctctctctttaatgaaagcaattgtggcactctggcttcagggaggtttatcggaccattctgggaagggatggaaaagcttttgttttcttcttagaggcatttttaggagctgtaacctggttattttgctttgatctgggggaaatagaaattccagtgggctggtggcttgcacagtagagacctatttgagccttgggtgaccccacccactcttaccttgcaaatttctttctttacccagaaatcagtatttaaaatactttgtgattcagaaatgttatcattttgttctcatagaggaaaagtttttgacctacttttattaacttgttcaaacctgaagtaaagacatagttataagggcataaagtcagaaaagacatttttgttcaaatttttacattgcttgcatatggtctgaatttcgctagatagcactatcaatctttggtatgctttagaaatagaattgaatgtattactaagcagtattaataattacattttctcaggagttcaagtgatgggaaacggtctttaatctcacagttattttaagagcttgaaatataatgtatgaaagaagtagggatcacccagctatcatatctttgctatttacttattttatggataaactaatgtgttgttcattttgattagcttgtattttattatagtttgcttgattttcagatttgactttaaacgtacttgaattatgtttttttctttaattttgatttatggatgtaaggaagaagaaggagagacagccacagaagaggtacggtcgaccatctttaacagctgtgcttaatctgcttaataaaaacatcttttaggtgggaggattgcagcttgaggcacgttcttaataacataagagagcgatgcaacccacacacccagaaaatcctcctttaacatgctgagaaggaaagtaagttggagataagtttgtccgagggaggtggagagagaaacggggcttggctgtggactctgttcggagccccctcaggtgaaggtgtcttccgtggtttctcactgacatcaggccaggccaggccagggcactggctggagatgcctgctcctcgtccttttccaccctgttgaatgcactgggtttaggcatcctgcatggtggttagtggtgttttcattgagggagggattccacctatgtttatgtttttgaacatctttgaattaatcacttttattgtttttttttttttttttttttgagacagggtctcactctcttgcccaggctggagtgcagtggtgtgatctcagctcactgcaacctccgcttcctgggttcaagcgattctcctgcctcagccttctgagtagctggaattacaggcacgtgtcaccacacctggctaatttttgtatttttagtagagatgggatttcaccatgttggccaggctggtcttgaactcctgaccccaagtgatccacccacctcggcctcccaaagtgctgggattacaggtgtgagccactgcactgggcctggattaatcactttaaaatgctagagaactaacttaaaattatgaacacaagggtagggagaataatttactaagttacgtgtattgtctagatgtttcagcacaaggtcatcaacattaaaaagggtcccaaatgtcaaaagaaatccccccaaagaaacttttgttaacttttttttttttttgagacggagtcccgctgtttagcccaggccggattgcagtggcgcaatctcggctcactgcaagctccgcctcccaggttcacgccattctcctgcctcagcctcccgagtagctgggactacaggcgcccgccaccgcgcccggctaattttttgtatttttagtagagacggggtttcaccgtgttagccaagatggtctcgatctcctgaccttgtgatccgcccgcctcggcctcccaaagtgctgggattacaggcgtgagccaccgcgcccagcctttgttaacttttgaaatgacaaaattcatgatctttatagaaaatttaaaaaatgcagatagaagaggaaaatgaacatagcttttaaccctcgttacccagagataaccactgtagctacatacacacacacacacacacacacacactgtagctacacacacacacacacacacacactgtagctacacacacacacacacacacacacactgtagctacacacacacacacacaccccatcaatttctggtgaatactcttgtagtctccttttttttcatggaatgtgtctatatttggggaggtagtcagtacagatctgcttcatcattttaaatgttaatatatcaaaccaacccctcttcttagacctatagattatttctagtatattctacaccatgatttctcaatatttacgtctttccaataattatttcttttgtttctctcttgctaggccagcttcaaaatagaattttaaaaataagataaaaacatattgttaatttggaagaaattccagattatatatataggttgctgataacttttgcttcaagaaattagcttgttacaagaaaatgtaaccaacttgtgcatttaacagctcatcctgacaaaattcaatttgctgattctttttgtatttgattcttctaactatatatatatatatatatatatatatatatatatatactttctgaatttgtaaaggttatttgctgagaatggtttgttaatatgagtggagactgtacacttaggtgggattataaaacctgttaggattaacatatcattctaaagcaccattctaaattgaggactctgtgtttagaaggatgattttttttatgtgtgtgtatgtatgtgtggtatgtgtggtgtgttgtatgtgtggtgtatgtgtatttgtgtgtggtgtatatggtgtgtggtgtgtttggtgtgtgtgtgtgtgatgtgtgttatggtgtgtatgttatggtgtggagggtatgtatgtgtatgtgtgatgtgtatgtgtatattgtgtgtgtatttgtggtatatgtgatgtggtgtgtggggtgtgtggtctggtgtgtgtgtgtgctatgtggtgtttggtatttgtgtgtggtgtgtatgtggtgtgtgtgcgtggatgtgtgtctgggtggtgtgtgggggggtgtgtgtgctgtgtgtcatgtgtgtttccgtggtgtgtgtgtgtttgggcggtatgtgtgtggggtgtgtgtgtggcatgtgtttgtgtggcatgtgtggtgtgtgtatttgtgtgttgtgtgtgtttgtttgtgtgttgtgtggtggggtgtgggaggctttgacctctagtccagcattttacagtctttttctcactgtatccttggcccttatgcttcttaatactaatgtaagttttgttaaaataagacggaagaaatagccatggagggtgcggaaggggaagccgaggaggaggaagaaactgcagaaggagaagagcctggagaagacgaagattcctaggccttttcatgcttcatttcttccacttctccaggtagctacaggattctggggtggaaaagctgctagttaccgtactgtatgctatctgcggcacattttgcttagtaacaggagaaagggaattccaattcagggctgtctgtctccttccaaagccctggtctgcacacctttctggcggggtccagctcctttctagagctgcggggctgctgacctttcgtgggtctgtttcttgcacactagggcacagaaggctatggttgatgggatttctaggaaaaagtgcacctttgatgcagggaagagttttgttttgcatttacttcctcctcttcctctatataaactttgtttgagagaagatacagcaagtgtccttttatcagcattctgtaacctcaactcctccaccaaccacatgtacaactttaggggggtgactactgatgttcagaatgatggcaataaattataaccttaaaaaatcacaaagctggtgttgagtcatgaaagaaaattattgctgccacgggtttagtcgtcagtgcttggtactccatttccgtttctattaaccagaacgctcctctggaaacaccggggaacatggtgaagtccctttaggtatctttgacaagtaagctcttgctgccttctggttttaaacttcccttgatgatggaaaataattatgtaattcttactagtttgataagtgccacatattagtgaacatttattaagtgttaataagacaatagaatctgataatggatcttgaggacatgggcgaatgcttaaatattgtgagccatacagataggacagcatgcgtgaaaacccctaaagacatgaagtgcattagccgggtggggtggctcatgcctgcggtcccagctacttgggaggctgaagcctgaaaatcacttgaacccgggaggcagaggttgcagtgagccaagattgcaccactgcactccagcctgggtgacagagcaagactctgtctccaaaacaaaaacaaaaacaaaaaacaaaacaaaacaaaacagaagacattaagtgctataaaaatatctgttttttcctgatatttggcaaatacctaggtacatgttgtattattattaatatgattggctttgcaactgaatttgaggccatagtttattctctagggcaacattgctcatggttttgctctggagctataagcgttttttaaaaaatttaaaaaagtttagtctttttatctcccatattatgcctccactgaaaattaagacggctttttgggctgttactctcaggagataatgatggaatatgcactcattattctctaaatgagagacacttatcaaaccagtaagaattacataattattttccatcgtcagtagaagtttaaaattacaaggcagcaaaagctgacttgtcaaagatacctaaagtgacttcaccatgttccccaggcaggtctctagttaagaattggtgcatgtacaaagaagggtggatagaagggtttatttggagaaggaagaagaaatctttggtgctctttaaaaattggctgacaaatagcaatgctctttgcaccaaagtccaatttgaatagtagggatgtcccttcttaatagacttacaaaaaaaagctgatataaaaagcacttaatctatttttagagcatcttggagctagtgagggtggccatcacactttgttattggaccataaaggttttgtcattcatttgcttgaatgagaaagtgattctagcccacgatttgatgtctctccagggtgtttctttcatgctctggacccacagacttctactttaaagccctctgcttgccacttggttacaattccatttctaaggagtgggttgggactcatttttgaaaaaaaggaaactggcaagcttaagatattctacctgaagaatggtagaaaatgaaaatatgattatatttatcctcataccagaaacaaaacaaagcaaaacccacagtaacagactcattggtcctgtttaaatccatgtctgttcactcagcttggaaagttctttaaaaattgtgcagttttaatgtgataattataaagaaatattggatgtgaaatggcacagccgagagagaatctttaatgtagacagatggcttctttataggccatttccaaaaaagaaagaaaaaaaggcaagttacagttgtggctagcacattctgcctgtttctctgatgggttctagtttggaatccagtccctaatagtctgttgtgaggtcaaaatgtctgacagtgaaggagtaaaccaggcagcaccctaaatcccagccactgactcccgaagagagtcaataacctttaaaatgcgacatgatgatgcagtcaggtattctgcaaactatttggcttccaaaaacaaacccatctcataactcatagattatccatgcattttatttgaaaagacgattttagacagaacaaggcaatgaatggaactatgaaagaattctcatttcccatagttgaagttggagtcagaatctattattattattatttatttatttattttattttttgagacagggtctcactctgtcacccaggctggagtgcagtggtgaggtcatggctcactttgacctccctggtctcaggtgatcctcccacctcagcttcttgagtcgctgggattacaggcacgcactactatgcctggctaattttcgtattttttgtagagatggggtttcaccatgttgcctaggctggtctcgaactcttaggctcaagtgctctgcccaccttggcctcccaaagtgttggaattacaggcatgaaccaccacgtctgacctagaatctaaattgatgtttgagtcccagggcaaataatgtccaatatgagactggattctacctccccaaagcttgccacttaataccttcttctggtgtagccatgaaccatttagagctccgcctctgggaccaagctgtcaattcagcctattttccatgaaaacacagtgggaaattataattggagatgttgtcttccttatggtgtttgatatgtgtttatgcagagaaaggatataaatctagcttagttttccatgagacaaattccctttcctttcagtggggagcaaatgatgactagtggtttatagaataaaaggcaacactttcctttattgtatgttaagtgatgaagattgtggtaaacattctgtgtctttctctacagtctttccctaatatttgccttttcttttagaaaatggaagctatgaagcaacatttcaaatgtctctccacaaaccaaactcaacagaatactttggcttgaagccggcacacccagggttactgaggacttatgctgcctgacctggttagatgtacatggaggtatctcccgaatcatacaaaattaaatgtgaagaccgtttatgcataccttcatgtgcctgacagtcttggcttttgaagatttttttttcttttttgctctgcatagctagaccatcttattaataatactctgaaaaaaatgatttcaaggcatggaagttctctgtgatacaacaatagtatttcttcaaatgcgccttatgctacttatctcagaaacaggttttaaaatgaagtgctttccagagaaccatcatataaataaagattaatagaaaaatatcttgtcccaaggagcatcatttcattatttatagtctctgcttgcatatgcctgaactccgtctgtctgttgccaagtctaaatcttcagcagcacttttctgtctgcgttgggatcgatgtcttttattgcactgattatttggtccatgttttcaattgcattgattgtctcattacgtcgtatttttttttttattacacacacgttgtgcgtatcatctttgaagccttatctaactgtaactttatcatccacttgtgtggggatgatggtaaggagggatgatggtaaggacagaaatctgcaacccagtgcccttcacacgtttctgagctgaagggagtggctgcttctgtttctcctgctgttgattgatttgtagccatggctgtggagacgggtcctgtaatttttcttcctgatggccaggagtgtgtgttcacctacagctgatccagctccaatgacttgtacaccaggtaagtttgatagcatttctctgctcacctgcctgcctcagtttactgtagatattttttcttccttgtaagattttgatattccccctgctacctccctgcctatgtgtgattccttgtgtttttgcagcaaatgttgctcctgtattgtcagaggggctcatctccttgctgtgctcttttcctatttcatgttaattatggcaattcaacttggagtggcataaactttcccctctggagtctgcctcctaattttgcagcagagtctgttggtgttatttcagagtgtattctgcagttgcagaagtctcgtggctgtcatgaactctgggaaacggctcttttcttgttaccctagtaacaaaaaaaggcattttgaatagaattaggttattttgtttccaatcattgaagtagtctgtgttaaaaacatttctccctttgcttaaggtaaaagaccacagtaaaatggaaattcatataattgaaaattaatttctacttttaatttcattgcactaaattatgtcctatctaaaaagcttgcataatttttacaacaaccccctacacaaataggccttaactttcttcttcttgctcagggctgacttttctctctttcatggcagagtaggatggagatagatttagttaggtgccaattttcctcctatttctctctctctctctctcttttttttttttgaaacagagtcttgctctatcgcccaggctggagttcagtggcaggatctcagctcactgcaacctccgcctcccaggttcaagcaattctcctgcctcagcctcctgagtagctgtgattacaggcacgtgccactacgcccagctaatttttgtatttttagtagagacagggtttcaccatattggccaggctggtctggaactcctgtcctcaagagatctgcccaccttgctatttctcatattttaaaaagaaaataaatatctatgctgacaataagcaaagataaaaacccagaccacttatttaaattgaattaattttttcttatattgttttcctgtagtcagaaacattaacatcttagaagggtatttgtatttgctcctgtttcattttatttaaagtatcactgaaatgcaaaaatcacttagatcaatagtaccctatggatggtatcagttctcttctagttttggcttcagctgtcccttcagccttccatggttagcaatccagtggcacagtgaggagaatcccagatatggactgtatggtatcaaaatacgattaaaaaatctgaatgcttttcaatataggaagcttctagaaactaagcagcattgtgaatctgtaaaaaagaataactcacaaggaaaccccaagtgaataaggaaaatcattttgaagaaaaaccaaaagagaccagagaaatggaataattgcatgatgatctgaagtgaatcgaagttcaaagagcttggtttaatagtataaaggaggcctgaacacgcaaaggaactgtttcttttctttccttttttttttttttaattagaaaagcaactacacaaaaatttgagtgtattttttttccagccactgaacaatacactctcctttccccactctcctctcctgggctccctctcgtttctttggactgaaatcttcctttgtggttgtctttgagttcttagttttctcaatgaaatgtgaaaggtataggaagagaatgaactgtattgcctgcaaagattctttggaaatatttacagattttttttctttttttttttttggagacagtgtctcgctctgtcgccagggtggagcgcagtggcactctcactgcaagctctgtctcccaggttcaagtgattctcctgcctcagctgccggagtatctgggactataggcctgcactaccatgtttggctaatttttgtatttttaatagagatggggtttcaccgtgttggacaggctggtctcgaactctgacctcaggcaatctgcccactgcagcctcccaaaatactgggattacaggcgtgagccaccatgcccagcctacaaatgttttctttcaaaactcatttacccgggccaggtgtggtgacttatgcctgtaatcccagcactttggaaggccgaggtgggtggattgcctgagcccaggagttcaagaccaacctgggcaacatagcaagaccccatccctacaaaaaatacaaaaatcagccaggcatggttgcgtgtgcttgtagttccagctactcgggaggccaaagtgggaggattgcttgagccagcactctagcccagcccattgatcacgctactgctctccagcccgagtgacagagcaagaccctttctcaaaaacaaaacaaaacaaaacaaaaaaaccgcacctcatttaactgttaacacctgtgcaagcacggcaagtaggtgtgaagggcctggtacattgtaataacagagaatggccattaggtggcgataaaagacaagcttcttgctatggtgtcgctgcccccgaggtcccctggctgtgaacccgagtcagggtactgctagttgacattagaaggtgggaagaggtatttgtcaaccagatggaggaaaatagacaaaaactctacttataattaatttgtgaattaattagtgtatcatttataaagcttttatccaagataactttattttgggccaaatgtgcatttattgtttgaatgcacatccttgcattatacaaaaggagcctaaattcagtcaacaactgattgcatgttgacaattttgataaagatacggggtcttttagcctctaatggggttctatcttatcaaataagtaaaaacagaactctgattattgaaggggttgattatccttttctttcgcaagacttttagttcgaatagaacatatgtccaaatatttggaaatatattcacgatcctaacaaaggcattcctttcacagttgtctaggttacttggctttttcactactttgttttggaaggactttcttggaagtagtaaaactgagttgggaaatctttaaaatgtatcagtgcatctggctgttttccaaatcagaagtcaggagattgttcaatgatgcggaaatgtactcaggtgtggaagattccagttggggaggggctcaggtggacaggtgtgagtagcatagagggggcgtggagtgggggcttaacctggggggctcctggttccagtccggcattctgtagatttagcacccggatcttgtcaggggaggtgagagaaacctccgaggcagactcccatgaatcaagctcacagtctaggcttacaatcagggtgtgggctttcctattatttttattcactaacactaacggagtgcctgctatgagccgggctctgtattaaaggcttcgtgtgttgccacagtaacccgatgaggtggataccatctttatctggcaaggaggaaactgaggcaccgggtttcaattcagtacttcggcaatggctgaaccgaagctgagatatacctgtgtcccactccaaagccacgaacagccttcccaacaagccctttcctctcggtcctggaccacagtacggttcctctacggtgcctggctggccgtgggcagtgtgcgccttggccccagagcgcctcctccgcctggctttggtcctcgcattctgtcttcagactcgatgccgttcgggccctggtgcaaggtgccttgcccttctcacttactatccacctattttgttttcttagttgcaccatcagaggtctattccattaccttcatcttccagttctttgggccgctagctgtggccgccaccaccagcgccagttacagagggaactgggtcactgtccacccacagggttctagaaattggtcagtggcctcagatccgaagtttcaggttgcagagagaaaatactaaaactgccacctgccttttccagcctggttgtccttggatatatcttgcccactgatgcggaaggacacacacacaccaataactcatttggttctgagctatcaactgccacgcagtgatgtgccagagttgcaaccagccccacatggtatttttagctgagagaacaactccttctagttgaggatggtttaatgagtgcgtcttaatcccatgacatgaattttagttcgttttgtagcaggtcaggtttctctgtagtccctgctttttaaaaaattatttttaattttaaattaaaaattttgtgggtacataggtgtatatatttatgggttatatgagatattttggtacaagcatgcattttgtttttttgggaaagtttttatttctccttcatgtttgaaggatatttccactgcatgtactattctggggtaagtattttcccttcagcacttcaaatatgccatgtcactttctcctggcttgtaaggtttctactgaaaagtctgttggaggtccattgtacgttatttgtttcttttatcttgctgcttttaagatcttttctttatccttgacctttgggaatttgactataaatgcctcgaggtagtcttctttgggttaaatctgcttagtgttctataactgccttgtacttggatattgatacctttctctaggtatgggaaactctgttaccttccctttgaataaactttctgtccctacctttttctctacctcctctttaaggctaataactattaggtttacccctttaggctactttctagatcctgtaggattgcttcattgttctttattcttttttcttctctgtgtattttcttatttttgatgcactttttgtttcaataatttttggggtacaggtagtttttgtttacatagatacgttctttagtggtgatttgtgagattctagtgcacctgtcacccaagcagtgtacctaatatgtaggcttttatccctcaaccccctcccaaacatcccctcaatcccttaaatttcattatatcattgttatgcctttgtgtcctcacagcttagtgctcccttataagtgagaacacatgatatttggtttttgattcccgagttacttcacttagaataatggcctccagctccatctaagtttgctgcaaatgacattatttcattcctttttatggatgagtagtgttccgtggttgtatatataccacattttctttatccacttgttggttgatgggcacttaggttagttctatatctttgcaattgtgaattgtgctgctataaacatgcatgcgcatgtgtccatttcatacaataagttcttttcctttgggtagatacccagtagtgggattgctgggtcaaatggtagttctatgtatgtagtctggagattcttttaagaatctccattcagttttccatagtgattgcactattttacattcctactggtggtgtaaaagtgttcaccatatctataccaacatctattgttttttgactttttcattatggccattcttgcagcagtaatgtagcatctcattgtggttttaacttgcatttccctgcattcgtgatgttgagcattttttttgtatgtttgttggctgtttgtcttcttttgagaaatgtctattcatgtcctttcccactttttgatgggttatttgttcttttcttgatgatttgtttgagttccttcaccagttatactaggtatggccattttacataatcccatatttcttggagattttgttcatttattttgattctgattgggttaattcaaaagccttgtcttcaggctctgaaattctttcttctacttgttctagtctattcttaaaacttttcactgcattttgtatttccctaagtgtgtctttaatttccaggagttctaattggtttttctttatgatacccatctttctggaaaatttttcattcatatcctgaattttaaaaaattcctttattttgtttttcacctttctctggtatctccttgagtagcttaataatcaatcttctgaattctgtgtctgctatttcaaggattttagattggtttgaattcattgctagggagctagtgtgatcttttggggtgttattgaaccctattctgtcatattaccagaattaattctctggttctttctcatttgggtagactattttttcaaattgttcttgaatgtatttgactgtatttttttctttaatttctttttttttttctcttaagggtctgacttcaatgtttatagtttattatagcctaatttgattcttggtgattttaggggggaagactccgtatgagttccttagttatagagagtctttgtgtgctggctttcccagatgttggctgtagtatttatgtacttggtgtatgggcaagttcactgtctcctacatggttggaatagcaaggatctcttgaagcttatctcattctcccattgtgaacagtttttaaatgtatttgatttttccccagcattttatttactgagttgatgatttaggcttcaggccagtagaggaggtaaccctgggtagacaccagttgtagctaaaacaggtaggtagctgtaatacccagtggtgggcgcaggttccagccttgatgaaggtgtctgagggagctctcaattagatgtctaaggttttatcagggtaaagggtgggagctacctcagctcccctgccaggccagcaggaaaactacttacctcccagcttcactcctgtcccagtgttctggctattcagatcagacaagcacttcttttcatctgtaggaatgttgatgttccaagtagagaggggttgtgactctgcctcccacgcaagcctaaatctgaggagtgctcctcctgtggggatgctatcaccctgaattgtaccagaaggctgaccataggtgcatccatgctgcatacccatgagagaagcaccagctgtgtctgcaatggtgtaccagagaagaacaagaaccccttttccaagacccttcatgtacagacaggctgcctgcctactggggcagactttccctactgtccctagcaatgcaattgtatctctgaaacttcccattagtggatagatctgggactcaagacctgctgtttagattctttcatctgggtattcttccctttgatgttgtattcctcctcttccctaaaaatgggaattcctgagaaccatactatagggattgttattgctctcctgggtctagccacccagtggggctaccagattccaggctggtgttaggaaatgtctacaagggatccagtaatgtgacctgtcttcaagtctcccatctgtagataccagcaccagctctgatggaggtggcaggggagcaatgtggattctgtgagattccttggttgtagataggcttagtgtgttggctttcttgaatgctggttataattgtagtgaacttgtcatgtggatagactcaagacctctggttagccagggtgctgtatgcagaggtgatagctgaggtcacatgactgttttctccttcctgggcacagtgttattctactcagaagtgctacaatggactgtgttggttggcctccatccaggaggtggtgattgccaaagagcactagctgtggtagtaacagtgggatttgagcttgccctaagttgccctgggaaagtattctggtttctcaggcaatgggtgaggctataaaactccccaaaatttatgtcctttgtgtaaagctactagagtgggtggaggggcacaaccaggttggggcagggttaggcaggtctgcactctgactctccttgagcagggttagtgacagctcccgcaagggttggggaaatttttttcatgctgcttgggtaatgttctggagaggagcataactgcctctgctgcacaggacagtttgcaaagggagtggggaaaagtgggtagcagtaagtctcatgcagctcccatgcatttggcaaggctgatctcactcctgcagtactctgctaacagtgctgggttagatccaggcagtctgtgcacagagctgcgccaggccatcagcttccctgcacagatagcaatcttggctttcaggtcacactgttccccatctgcccacaaggctgggtacccagctcctgagggtagtgtctgtagagcacttgccattcacccctccctagattctgctcaagggaatttgtccccacctgagattatattataaaattcagttgaaaacttcttaattcagttgaaagcttcttttaagttgtgacccctccctgagttcgttggctgacttctctgaggacccctgtgggatataatcaggaatggcttcccccagttcatgctggagactgggaatgcctgcaaggcacttcctgctgctgcttccacttttatctttcatgtcactccctgagtctgttccagctctgggtagagttaagaccttctcccatggcctggattttcagattccatggtgggtgtgtgtgctctggaggcagactctccccctctcacactccggggacttaaacagtttcttacttgtctcatagggtaggctgcagcctgccacttctttcaaaggtctgtggattcttttggttttcttgttaagttcctgctttgattcttggaaaaaaaaaattcattgtgaatctctacacagtattctttccttccaaatatgagagacacactaacactgcctccgatctgccatcttggaaaaaaacctgactgtgtatttgcaaatagcctgtcttcaagctcactgattccttattctgcttgatcaattctgctattaaaaaactctgatgaggctgggcatggtggctcacgcctgtaatcccagtactctgggaggccgaggtgggcggatcacgagatcaggagatcgagaccatcctggctaacacagtgaaaccccatctctactaaaaatataaaaaattagctgggcatggtggcaggcacctgtagtcccagctactcaggaggctgaggcaggaaaatggcatgaacctgagaggtggagcttgcagtgagccaagatcactgcactgcactctagcctgggagacagagcaacactctgtctcaaaaaaatagaacaaaactctgatgaattcttcagtatgccaattgcattagaagtctacctagtattctattgtactgcagccaagctggcactcaaatcattagacacagtctctcccgtttcaacaggcagaggagcctcagtcacatggccactattgccacaggcccacgaggagtactgccaggctcctgccaacgttcacttaaggcccaagggctcttcagtcagtttgtggctcttcagtcagattctggttaggccccaggaactagagtctttttaaaagctcccccagcctgctgccttgaaggatgctgaagtccctgcacttgctaacac

SEQ ID NO: 839 - DNA, 795 bp, Homo sapiens
tgtagacgtctgtaaacgatcctcctgccgtccctgttcggcgcccgggaccctgccttcccgcgtggccgcaccgagacgagggagcctgtcacgcgctctggcgctctcctgacctcttaaggctctgtcagtcttagattaggaagaaacagcaagaagtagtgggttttttggaagcgaataaaatcgactttaaggaattagatattgctggagatgaagacaacaggaggtggatgagagagaatgttcctggagagaaaaaacctcaaaatgggattcctttgcctccccagatcttcaatgaggagcagtactgtggggattttgactctttcttctctgcaaaagaagagaatattatttattccttccttggtttggctcctcctccagactcaaagggatcagagaaggctgaagaaggtggagaaactgaggcacaaaaagagggcagtgaagatgtgggcaacctccctgaagcccaggagaagaatgaagaagaaggagagacagccacagaagagacggaagaaatagccatggagggtgcggaaggggaagccgaggaggaggaagaaactgcagaaggagaagagcctggagaagacgaagattcctaggccttttcatgcttcatttcttccacttctccagaaaatggaagctatgaagcaacatttcaaatgtctctccacaaaccaaactcaacagaatactttggcttgaagccggcacacccagggttactgaggacttatgctgcctgacctggttagatgtacatggagg

SEQ ID NO: 840 - protein, 128 aa, Homo sapiens
MRENVPGEKKPQNGIPLPPQIFNEEQYCGDFDSFFSAKEENIIYSFLGLAPPPDSKGSEKAEEGGETEAQKEGSEDVGNLPEAQEKNEEEGETATEETEEIAMEGAEGEAEEEEETAEGEEPGEDEDS

SEQ ID NO: 841 - DNA, 1240 bp, Homo sapiens
ggaaagggtccagtggctgcttttatcgaccaatcaaatattttcctgacagatcccaaaatattcctgggccaatggagggaggagcccaagatgcctctgctgctccttggagagacagagcctcttaagttggagcgggactgccggagcccagtggacccctgggctgctgccagccccgacctggcacttgcttgcctgtgtcactgtcaggatttgtctagcggcgcattccctaacaggggtgtgttggggggagtcctctttccaactgtcgaaatggttatcaaagtgtttgttgctacatcttctgggtccatagcgattaggaagaaacagcaagaagtagtgggttttttggaagcgaataaaatcgactttaaggaattagatattgctggagatgaagacaacaggaggtggatgagagagaatgttcctggagagaaaaaacctcaaaatgggattcctttgcctccccagatcttcaatgaggagcagtactgtggggattttgactctttcttctctgcaaaagaagagaatattatttattccttccttggtttggctcctcctccagactcaaagggatcagagaaggctgaagaaggtggagaaactgaggcacaaaaagagggcagtgaagatgtgggcaacctccctgaagcccaggagaagaatgaagaagaaggagagacagccacagaagagacggaagaaatagccatggagggtgcggaaggggaagccgaggaggaggaagaaactgcagaaggagaagagcctggagaagacgaagattcctaggccttttcatgcttcatttcttccacttctccagaaaatggaagctatgaagcaacatttcaaatgtctctccacaaaccaaactcaacagaatactttggcttgaagccggcacacccagggttactgaggacttatgctgcctgacctggttagatgtacatggaggtatctcccgaatccataccttcatgtgcctgacagtcttggcttttgaagatttttttttcttttttgctctgcatagctagaccatcttattaataatactctgaaaaaaatgatttcaaggcatggaagttctctgtgatacaacaatagtatttcttcaaatgcgccttatgctacttatctcagaaacaggttttaaaatgaagtgctttccagagaaccatcatataaataaagattaatagaaaaatatctt

SEQ ID NO: 842 - protein, 235 aa, Homo sapiens
MPLLLLGETEPLKLERDCRSPVDPWAADDLACLCHCQDLSSGAFPNRGVLGGVLFPTVEMVIKVFVATSSGSIAIRKKQQEVVGFLEANKIDFKELDIAGDEDNRRWMRENVPGEKKPQNGIPLPPQIFNEEQYCGDFDSFFSAKEENIIYSFLGLAPPPDSKGSEKAEEGGETEAQKEGSEDVGNLPEAQEKNEEEGETATEETEEIAMEGAEGEAEEEEETAEGEEPGEDEDS

SEQ ID NO: 843 - DNA, 89213 bp, Mus musculus
  misc_feature (1)...(89213): n = A,T,C or G
gaatacatagagaacaacaacattctgcatacaagaaaatggttaacaagcaaactgaatgttaagtgaaagaagccatatgggagctcatatagtgtgtgatcccactatacaaaattcagagtctaagtaattcacagattgcttcattggaatgcagatcagtggctgtcagaatttggacagggagtaaatagggagcaaatacttattgcttctttggggagcagcacgcaactattcacttaaaaatggctaactcgaggcaagggagatgtctcagtgggtttgatctcttatctcttgctatgtagacatgacaatctgagtttgaatacttggcacttacataaaaaactgggcatggctgtaggactggaagttgggtggggtagagatagtcagattctgagatctcacaggctagttctgtgagagatattgtctcatggaaatagagtaaggagcaatagagaaaggccatctagatatacacatgtatactcacatgcttacaccatacataacacacaatgtgtacacataaaaaccgattaattatacatcaatttaattaatttctttctttttttttagcttaaggaaggaagttttcaggaaggcaggtattgtgtaacttttcctaggagttgtgaacaaatgtctattcacccattctccatggaaagggcactaaagacagaccaatgaagcaattctctagtgtgagagataatacatttattggggttacttataggtacatgagtgaggggctcattacaagactatgagcaactcaaaggcgacaccttatggaaaagcccccaacctccataccccaaataggtgcagattcgcaacttacaaaagcagcatccttagataggcttgctagcagctcttcagcctggatagtccactttccctagcagttgatactgactatgtaaatgtaaggagcaattttctaattctgaagctaagatgacttgtggaattctaccatcactaaaaaatctttgcaggacaggtagtggaggtgcatatgcgcctttaattccagtactctggaggcagaggcaggcggatctctatgagtttgaggctatcctggtctacagagtgagttccaggatagccagtgctacctaattagatttgactttgactttcgtatctctctaataacaccagttatttatgtttaactttaagctaaataactgagaagatcatcagaatggtagatgtgataagaatataatcacacagtcgggcgtggtggcgcatgcctttaatcccagaacttgggaggcagaggcaggcgaatttctgagttcgaggctagcctggtctacaaagtgagttccaggacagccagagctacacagagaaaacctgtcttgaaaaaccaaaaagaaaaaaaagaatataatcacacattggaacttcagatgtatttttttatggtggtaaagcatgcttaacataaaatttattgtatttttataaccatttttaattttcagtggcattaaagatattcacttaactatgtaaccaccaccattgtccagctttactctttcccataattccaaacaacatacaccatttgtgtaaaataaaattcatccttggagccatttttaaatgtccggttcagcagcattccccctcggatatctacaactctacgcccattgagtccctctctatctctttccctagccattagtaaccaccattcgttattgatctcactgcagctactttaaatgcctcacataggggaaatcacactttatttttaataggaaatagtcacttgatggaacatagttttgcttgtttggggacttactgatgacagtttggcccaagccaaatcaatatgatagattcatcttatatggtgcattacctcctagcccttgttcgtggtctttcctgtgtacagaaactaattgtcaccctgtcttttaaaaatcacttatcaggtagtacatttactttgaagctatttgtaaaattctcctcttcctttgactgttaagtgacataggaaacattaggcagaacagtctagagaaggtgggtcttctgcattctcctgtggtacttgttactatgcctatgtagcctctgttaacaggctgtagtttctttccatcagtggggagtggtttcagccactgaatttccctgctagtgttttgatgtggatggctattttgcctacatagatgtgtgtagaccacttctgtgcctggtgccctctgaggatgtcagatctcctagaactggaattacaggtggtagttagctgccatgtggtttctgggaaatcaaactcaggccctctagaagagcagtcagtgctcttaaccaatgagccatgtctttagcctcccctacattttcctcttagcgattatattacatttttcccttcccttcttccctctaaaccttcccactctcctccaaagttacagcctcttcttttattgtttttgtgcaaatgtgtatatacatatgtatttctaaatataacctgctcggtcaatatgttactgtatgttttcagaactgaccagtacaaccaattggtgtgctcttctctgggtaaacccaaatttcccattcccatctttcctcagttgcctatagttctttgtgtagagttgaggcctttgccccacccactttggcgtgtccattggtgtcatccctgctcagatcatgattgggcagtcatgtcgggaagactttatgggtatagcttctgacattagtaggagacaccatctcacagtaagttccctgatcctctgatcttactctctttctgcccaattttctgcaatgttccccaagacttaggtgcagaaatgttttgtaaatgtgtgcagtgggactaggctctacaagtgtgcattttgattggtatggttttctgtaatagtctccatctgttgtggatagacatttccttgatgaggaatatggactacacttacctgtgtaaatgaggacaaatgtttgtagatgactgttgttagggatcatgccagtttaatacagtagttgtagattctccttcaataactacaagtttactagcactgagtagttagcgaggttcccatcaccaggcatggtttccctccaattaaagagctgttggttactgtcaaggtatgtatgccactgctgcaccttagggtgctggtcatcgatgggattcatgagcatccatagctaggtaggtggtctccgtcctttggaagtccacatggtgccttttggtaccatgaaagctagttttcagggaaggagcgagcattcaggtcagtgcaagctctgggactgtttctgaagtgcatggtgtcttcaacagcaggcattttccttccacctctctcctaccagtattctaatgcacatttaaagatgaagatcacagtacttgaactaaacagagactaatatgcttaaaagctataaaatattaagccttaggaatatagattattaaattttaccctttccaagctcctggggttttttttatgtgcattgatgttctacctgcaagcatatctgtgtgaagatgtcagatcttgcacttatagacagttgtgagctaccatgtgggtgctgggatttgaacccaggtcctctggaagaacaatcagtaccctcaactgctgagccatctctccagccctgcttttgtttttatgagcccttgtttggtaaaatattgttaattcaatatattaaaatgtgtgttcctttagtccagtttcccttttattggattaaacagtttcaacaaaaacaatttacaagttaagaaagtgtggaacagtctaactgaggctagactgaggcatgtgagagtaaacagcaagaataagctggagcagaatgtcctcccgtgcttccactccccattacgtcgcagctacgggcaattgggggatggcttaccaacagggtgaaattcgaggtcagcattagaatctcaggaatgcagtgaatcttcacctttagttctacctacattataccaggcacaagtgttgggactcagtggtctgtgtaacaagctggaaactcaggacctgtgggttatgttcacaagcctcatgtctgttgcttcacgtgagctaatcatattcactccctgtgttttatttagcttttcttcccttggggacgctagtgataccaaatcacttcctaagatttttttttttttttaaagaaagcagtaaatgctctagaagctgtgatagccatagcttttacaagagcagatgtagagacacaggtcaaatgctctgcaaatggactgtgaatagagagcacgagaatgaacaaacactcctgaaacctctttcagattattaacttttcaaaacttcttgctgaaatcaccaaagtgattctctctagaacactatttggctcccttgtagttcctcatgtatttctctacagtgtaggtggttaataagtaggaaaagagctgagaggtaagacaggagggaagaaatttcagtgcagaaatcaccatgtttaagtagtttttgtgttccgtgtgcaagtatgatgtacagtactgtatgctgagatgcagctcggggacaccaggtggctttcccacgagaaaagactcacagaggctaagtgccaggctccacataaagtgcttgagcaatctctctgacttgagagcccacattctatagctttgcctgttctgtttcaagaaaaactggatttgtttatgtataaaatcaactgaaagggatctgcaaccctataggtggaacaacattatgaactaaccagtaccccggagctcttgactctagctgtatatgtatcaaaagatggcctagtcggccatcactggaaagagaggcccattggacacgcaaactttatatgccccagtacaggggaacgccagggccaaaaagggggagtgggtgggtaggggattggggggggtgggtatgggggacttttggtatagcattggaaatgtaaatgagctaaatacctaataaaaaatggaaaaaaaaatcaactgaacctatccccaaatttttcagaagtcaggctgctccaaggattctcctggtgtccacactgggctgcactctaacatctcttcacacggctacatgcctgcctcaagttctttattaatcagattctttggcatcccaccccaaacccacctctcgacttcagcttgccaaaacctgatcatacctcatacaagtatacattccgctcctgccctcattactctaacgacttctgtcttcgtttccaagttcagattcctatgagaagcaattctcaagtcacccttctataccaagccataggtcacaggctagtttatatgaattaatgagttgagtgataatgtgagtgcccaaacactcagctgtagctgaggattgtcaagacactaaacttccctgaaagctatgctattttccatagcttcccatctatcattatacaaacccagcagacaatgggaacgtacactgtcatcccagtacttgaaaggtaggcaggaggatctggaatttacgactgactctgtctgcttatcaagtttaaactacactcgaccttatctcaaaaaacaaacaaacaaacaaacaaacaaacccaaacaccagcttcccccaaacaaggcacctcctttacttattctttacctgtttcataaaagataccgccattctccctactgcttgcaataacatttaattttgttggaaaaaaaatcaatacatgtgaatagcaaaagtattcaaaatacaaaaggatacatagccctggtcatagtgttgttacatacttataatcccagaatttgggaggctgaggcaggggggactataaatttgaggccactctgcctacagagcgtgtgatgccagctttggctcacagtgagaccttgcctcttaaatcacatactataaactaagacacgggattagagaaatgactcagcagggaagaacacttgctactcttccaggggacctgagttcagcacccacagcaagcagctaagatcacctataactccagctccagagaatctgacaccctcttttgatatctaagggaacctgtacacatttcaggtgcttgcgcgcacacacacacacacccatacaatcttttttttttttaaatccacctgcctctgcctcccaagtgctgggattaaaggtgtgcgccaccacacccagcgggcattttttaaaaatatttatttatttatttattatatgtaagtacaccgtagctgtcttcagacattccagaagagggcatcagatttcgttaaggatggttataagccaccctgtggttgctgggatctaaactcagaacctttggaagagcagttggcgctcctaactgctgagccatctcaccagcccacatacaatcttttttaaaaaataaaaggaaattgtcttaaattctcatggcccttctagaggcagccacaggcaataggttttgaagtactcttcagaaagaaatgatttcattatacaaacattttacactcattttaattctaaacaaaagcataaacagtatatcctaaatgtaccttattttcctggcaacaaatagaaatttaggacaattccatgtcaaaatacataaattgtttttattttaaaaaatagcttcatagaaagttgtgagttttgtcttaccttaattgtgtgtgatgctaaggtttcatggatggtatacaggtgtctatcactgagctatgtccccagccctaactttcatcattttctatccagccttcctgtttatcccatgtcagctgggttctgtactctctccttccatctaggtctttgtacttgagctttgacatctaggccagtttccgttgctccatgcactgcttcctggtagctctcatttcatcttccctctattaattcacaacttattttttaaaaagccaggttatatttttctcaatttcagtggacttctaacatcagaaccctttggtggttgctcatgtccatagtaccaagtatgaatccatacctaagtgggctctttctggagaccagtctactgtggagccatatatgtatacaacatctatttagacttccgctctgctgctctcaacctttgtctcaccccttctcttgcctgggtgttctccttcctgttcaaacttaattgtcctgagactactggttctctcccggcttgctctggaatgctcttcccatgatgattagacatttgctcttaacctctcatttggcattcacaaacaattttttttttgtcttctaaagctatatacttcttaggtaaaagagttctcctaaaacatttttgtatcacacacacacaccacatagcccttcatattttgagtgtctcaaaagacatgtagattgaaagaagacccaaatatatttaggatagtctagaatttttttaaaaatacatttacttgtgtgggggaggaggtgggtgcatagaggtcaacatgagaaaagttctctttttgcggggaaccagcaggtcaccaggcttggcagaaagcactgagccatttgatgatctcccaaatatatttacaagagggaaacctgggacggggaagggtaaaagggtggccaagaaagggctatgggaagatgaatatgaacaaagggttggcatgcatgtgtgagataccataatcaaattcattattttgtataatttgtataattgtaataaaaggctggagatggctcagtggttaagggcactggctgctcttccagaggtcctgagttcaattcccagcaaccacatggtggctcacaatcatctgtaatagaatctgatgccatcttctggtgtgtctgaagacagagacagtgtactcatatatatataaaatctttttttttaatatatgtatttattttatgtactcatatacataaatcttttttaaaatatttattttatgtactcatatacataaaatagatcatatggaaaaaatatgccctacaaaacactagggcaaatgagacccagcctgttacccatgagactgccaatagttggtataaagcacacacgtatactgtttgctaatcactaactggtttttacattcttggctatatcaaaagtgtaggtgatcactgtggcccatgtctatgctcccagcacttgtgaggctgaggcaggaagacagccatgccagcctgggttactgagtgagaccctggctgagagaacccaaaatatagagacataaataaaagttaaagcatttctgccatttacctatttgtccccatcgagcctgaatcttttgcttacattcagtgaaatttagcctgtgtagtgggttaaattactacagacactcctttcaaaagtttattttagtatggaaagcatctcttgaaatgctttgagagaagtgagttggtacatatcagatgcattatttcctgtattttattttaaagtgtaactgtatattgctactcacatgtgttgtcttcgattttctttttaattaaatttcacagtgcggccaaatatcggtttaggaaatgtttcctgcattgatatttcctatcttaagcatatttcctggcagcctgttctgtgaaaacatgttttttgtttgtgggtgtaggtgaccaaagtcagtccatggatcaaatccctcagttgtgcaactgtgtactactacaaactctcgtcctttcgagaaaaagtaaaagttagagtcaaagtaaaagaacctgcgttttagttctgactccacatgaacatgttgggggggtgaactttggacaaatcatttctatttatgaaaggacagattgcatcagcacgctctctgtctgctaagagtcacaaattctattctacgaaagaatgtcacccattcaactctgaaaccgtgagaatttaaagataggaagcaatattgtcttcctcttggcaaaaaaaggtgcaatgagaaagatgcattacgaattaagagctttccctcactgggattagaaagattgcgaagagtaaaccctttcactctggaaactattggcttctcctagccaaagtgccaaagccttgggagaccctcaccaaggcattcgtaaagcgaaggtgaaggctctactacagttcccagcatacctctgtcccaccctgctccgggcactcctgcaggcgggtcttgtagtcccagcccgcggccggcagtagcgctgaagcacttttggaatcagctttccctccccgccaaacccggaggccgcaagccccatctgaagtttactgtctgacccactgggcttggccgggcttccagacgtaggacgtccaccagaagccagcctcaccgcagcgagcggcgagcgccctaggagagggccacgccccggaagcggcttccagccactcagagcgggcgggggcgggcccgggcgggcgtgcgggggcggctgggtcttcgctctggggcggggccgccgtacgagcccgcgcgtctgggtggcggcgggggcgcgcccgtggggagaggcggctgcggctgctggtggggggtggggggggaggcagaaccgggaagggggcagggcgaactgagagccgtgttcctgaggcggcggcgtctcggactgaggagggcggggaaggaggatggggcaggctgggggttggggccggcgctagcccgcggctcgcctcgtagtaggggaaagcgacgctgctctttaagttgcgcggggagcccggccggtgccgccgcagccgcagccgcctggcgcggcggggagggagggcgggccggagcgagctggggaagacggagcgggcgctgcggcgcgcgggcgggcggcgggggggacgcgggaggatggagcaagtggagatcctgaggaggttcatccagagggtccaggccatgaagagtccggatcacaatggggaggacaacttcgcccgggacttcatggtgagtgtccgttctcgccggcgcctcgtgtcgccagccgccgagctcccctcgcctctcccggtcggtcggggctgccagcgctttgtgtgcggtgcgaggacaggcgcggggcgcgcgcccagccgcgagcgccgtcggcgagcttgcgggaggcgaggtcacccccgcccctcagcctctcttttccgcggccgctacctgcgctccccggcccagcccgctccggccccgccgcccgcgactacctattgtctccccggccgggcggcggcggctggagtgcgggctcgccttcccacgcctgccttccccgcctgcccctccggggagggtcgaggcgagctgtctggctgcggccagcggagcggctcgaggctgccggagagcgagggtgtagagcattaactcgctgggtccctgtacggatgccggccttggtccgagtggacggcaggacgactccgtgtctgggttcacagttattagctcagcgcttgccagaggcttgaccataaggaatctcatggtttacctgatctccatttatctggtcaggtttcttttcgtcctgagacccaggtttgaggtggctgtgaggccagtgtgactttagatcgaaaagggagggggatatcagtgtggatgggggttatcctgaaggaagctcactccggacttgaggggatattgccgaagccggaggggatgtgactatcacttcctatccggggtgggggtggggaagctgggaacaatagtcatggtagggtggaggcgactatatgggctgaagccctgggagataaccttcccgtccccccttttccgccacccccctttccgccctctgcttgtgtaggcaggcttgagtgagtggaggtgggggttaaaagtctagtatgtgaaatttctctaggtgcataattggagagagggtatcaattccgaaggcgtgggaccagaagctgacttcctacattaccccctcctcgctccttttatttttctgttggacaatgttccctctagggttgtttcccggctttggaggcggtggttgcggctgctgctcctacggatgttgcgcaagactggggcgttgtaaaccctggaggtctggggaatggaaaaggaaatgggactttgggaagtccttcgctctttagcgggggttgggaatagcaaatgaactagggaaaattttgctctggacaaggtgcacttctaagaataatcagttcatctgaaatttggttatgaaaagccatatgcagttgaggtctataaaaatgagtggctacgaaacatttgctagtttttatttaaagtgcaaatgaagtgatttttagtactgaagtgggtgttcacattttaaagagatttctgtctagtaaaactttagtgttaaaattgttaatggcttgaaaagtagactgttagccttgcacagtattagtagtattgtggggttttgtgacttccaccttgcagttttataaaaatagaaagtaggaacaagatacagtgaggactgaaaatgtagatcaaagtccagttattccttattttaaacattttctgatatttagatgatgttttggaaaaagtacttttcttcttaccatcgaattttgatggttagtatctgttgaatgatatcatttgcaaacattggaaagagccctccttttactactctatagtaaatgtagaagaaaacagttcattgagggtgtgtagaactagtggcttgtcatagaaggggccttgtggccctggctgttggtcgaatgcttgctatcttgctgtcctggacatactctgtcaaggatcattgttagtgcaggccatccggacaggtgcccagtccctgcacttttggacaggggatctagtcttggggttcatgctttggggatgactcagggattcctattggagatgtcatgtccaaggaccaaatgtgttcccattcttccataataccaaagtatagctaggtagttctacatgagagatttgatgactaaggctattattcttttatagggcttgcttttttaatttcctaacttgataagcagtagctataattatgattgttggcagttgcctctgtttttttcccttgactagaaggctggaaagaactgtcctctgtcatggaaagagaatcaaagatgatcacataaattctaacttttgttattaaattctgaagtggattttaaaatccattttaaaaaagagatggtgacatttttggaaagtatgtcgactgaaatcactgttgaaatggtgtcacatgaagctgccagtccactgatgcctgaactatttcatcatgtaaataatttccatgcctcccttttataataaacgaatgatgcctaaactgacagccattgtctctgacctttagtttcactgaactgttacaaatatttccaaataaaatgttgtaaatgaaaaaaaagaaagaaattaaaatcttatgaaaattcagaatcaataaagatgattaagtggatctccaaaaagaaacacagtcaacatcaaaataaaattaaaagtcaaaaaaaaaaatccattttaaaaccttaacattgtagaactgagtcttaaaaggtaatatcactattataactatttcattataaagtaatagtttcaaaattgcaaattatagaatataattattaacagtaatgatataattataatggtaatactttatatttgggtgattggattgggcatccatactgtggccctattttaaggatggagctactcccattctccctatatctatgtttataataggtctatgtcacaataagtacatatatttgcctttgtaagtagttagaagtttctgtttgttttgtttctgaggggcagggagctgaactcactcaggacccaggctgtccttgaactggtgtcagccctgtctccgcctccctagtactggctgggatgaaaggtatgagctgccatacctgtgctatgttcttgtcttttgggtttttttaagcttagattttggtgtcttttattacagctactttttaggaataacttaagcatgtcacaatgtgactattatagttaaactattggcttgtatttcaatatttgttctattgtacttttatatactttgattgacatgaataaagcctctgcattgtttattcctaatatatttttacaagaagtacacagtcagaggatacaaaacatatgcttgcaactttaaaaagttactttatacaatagtcagtaatgtataggtgtgtgggtgtgcgcatatatatgtatatatataattatcttggtttttatttagtggtttagaaattgtatcttgtttgctttggattttttttttctaaaaagacaaaaaagagttttgtcttttccagtctggatctaatacagcctaggccagccttgaacatgctgtgtatattaagctcacctaggactctggatcctcttgcctctaccactcagaggctagaataatttgtcactattcgtgacacgaatttcttgtttactattaatgatagatgattgtctgcctccataggcatgtggtagtcttttcatgtaattccagcagacaggagatgaggcagggagattgtgagattgagacaagcccagcttatgtgagagctgtgatcctgtcctaaagatggacggaggaagtaggaaagaaggagttaactagagcttattcttcttggccttggcctgttgtacctgttctctcaaaaggagaaacctaggcaccaaggttttgtggccaggcacattgtacttgacatgctaattttgctaataaaatgaactaatttatgacaggtctggatcttgatctttactctcaactttcagactaagatcatggtacacatcagtatttcacaattaggctttgtcttttattttcatttatgtgtatggctattttgcctacatgtatgtcattgtaccacatgcatgtctgatgtccagaagatggtgtcagttccctggaactggagttataattgtgagttgtcactgggtactgggaatggaaccccagatcctctagactagccaatgcccttaatagagtctgaaacaactcttgagccctcagagttaggttttatttcatacccattgcctgaagttgactgaggagagaggcagcctggaaccatgtattgaggaccagagaaccagtatataatgcagagaaaaggtgatgcctgagacaggtaggttttggactgtgaggagagggtggtggtgagtccactttgtgaaggatcttaccaatgtttaacagttaatattctgtagggccataatgatcactgattcctagctggcttgcctaaccttctgacattgcaacaccaagttgtcatctataaattctcattggaaaaccatgtggttgagttaaaaaaaccaaaccaaaaaagctccagaaaaatttcattatgttttaaatgagtttacagattggtgttgggccacattcttccttaccatgttgtgcatgtggaagctacaggttggaaatacctttcaggatcacagggaaaagtgaggttattgagaataacaaatatgcttgtttaacattcttgtggtcttctcttcccttcctcacaccctaccttccgagcctggtttttaagattactgtaagccttatcttattcagatatgttctggtggagaaactgaaagatactatgaacctctggagggcaggcagtggaatgtcttaagaaaggtatttgtttggcagaaagggctttatctgaattaagtcaaggaaactaggagtatatacgacatacttgatgagggttagccagcctcaagcaggatggatgtgcacactcatggtcccagagcccagaaggctgaggatactgagttgaaaactagcctgggaaaaggagaaagaagaagaaaagggagaggtgtcttaatgactcactaggtaccatttagtacagtgggtggaggaataagaaaagaaacaaggagagctgatcaaataagattgtaggagaacggctcagaagagaagatgaatttagtttcagacgtgttaaatgcccctgaagtgtccagtacaagtctggagctcatataggtagcagtcatgagtttgtaggaggtaattgagcatcccgagtgactaagctgattcggacgagcattatcttaaataggataggccttgaaaatgtgttgtggttgttcctgggaaggtgtggtcagagtggagggacaggaaccagggatgtctgaggagaaaattgtcactagagctaagtcctagtgcttgaaggcctggcagggtgtagttgagaaaccacccactcggtttgactggtgggaggtttgccatctagacaaagcagtttggggttagggtgtagaaggaagccagattacagtccttggaagagaaaatgggtgatgtgtaggtatagttttcttccatctagtcttaacattttgaaactagatggtagaatctgaaaaaagacaagttttgagagtgtttttttttctactatttattactgtgcatctattttcttttaagtacaaataagtaaaaccctgaaatcttcagatttggtgcttgtgtttagaattttagaaaacacaaagagattctgaaagtctacagagatcttaagcttcagagacaaaataagtataaaatattgtttattcaatattgtggcctatagggttttttaaagttaataatagctttacagagataaaattgcctataactgagttcattcaaaatgtatagctggactagagagatgactcagtggttaagagcactgactgctcttcggaaggtcctgagttcaaatcccagcaactacgtggtggctcacaaccatttgtaacgggatttgactccctcttctggagtgtctgaagacagctccagtgtacttacacataataataagtaaatcttcaaaatgtatagtttactagtttttagtatagctacagagttttgtacagtcattaccacaaccaattgcggaacatcttaagcaccccaaaagaaacccctgcatgtgtttgaggtcactccccctcttagtacagcggtcagttacccaccttttgcctttggagacttgctgatctggacagtctgtgtaggtggaattggaatatttgtagctgagttcccgtgttttattttctttgtgctctgcccccaccctgtttttgtttgtttgctctggtgtctgagttagggtattgttgtgtagtacctggtgtttgagtaacggtattgtcccttacccctgcaggccaggtgcatggctgtccttttgcttcttcagtctcccgctgccaccacactgggctggcatgctttcaagattcattcatgttgcagtatgtgctaacagtacttattctgtttatgactgaaatataatctgttatgtggagagtgcatcggatttattcattagtctattgaggggatttgattgtttccccttttggccactatgaacagtaatgctactgtgaatgttggtgtgtggctttgtgtgggcctatgttttcagttctcttagactaaaaccggaattactggaattgtttagttggttgaatctcttccaaaactgtatatgtaacaccccacataatagaatatatgtggatcacagttttgctatgtcctcacgtccgtctttcagattattgttatccttgcaggtatgaaatggtattttggcttagcttgcaggattttgtatatgtaactagtttttgaaagctagtaataggaaatattttttagtccttaaaattgagctaatcttcatgcttaatgttgctgatttagttattgctttttgcccatcttttgtgttcagacaggcatactaaaattttagatttcgcaagtgggcagacaaccttctagttttccagatttttgagacagtgcgctaacgatttccttactgtgcttatttcctagaatggtttactgcatttattacaatattgctgggttgtttttatttttgttttttcagtgtttgacatctagttttgaaggccaagcagtggttaagtcacaccttctatttcatcccagcactcaggaggcagaggcaggtggatctctgtgttggaggccagcctggtctacaaagggcgttcaagacagccagggctacacagagaaaccctgcctgagagagagggagaggaagagaggaaagggagggagggagggagggagggaggtaaccacatctaaacatctatctttcgtactttcaattttattattagcacttcgactttagtattaacatttatcatagaagacaatataaacaaaggagtaaaaaaaaacagaaatttctcgcgacccacctttacaaactaataggaatgataatcccaacaggagaataacagattatatatgagagaactattatatatttataaaatataaaagcggcgaatagttatgagttccgcaagttaattatgaccaccaaaggcttgaaacctataatgatatatctttaatataaacacagtatgtacaccgatattccaccacgcgtagttacattttcaatttatatttannnnnnnnnnnnnnnnnnnngataggaaaggtgggtgcgaggagcggtgaggaaaaagagaaagaataggacaggggaggaggaaaagcgggatggggggtgggtgataagggagaggaggaaaaacggaagaggtagatggaagggaggggtagtaggggggaaggagaaggggggaagaaggagtggataggggaaaggggagtgggggggggtacggggggaggaacacaagggaggaggaggagcgggtggttgggtttggagaagggttgaacacgaaaaaaaataggaggagggaaggaaggaaggggaggagaaaaggtgaagaaggagaaggtggggaaggggagggggaaagggaataggggggggaggagaaggggggagggagggagggaaatgaaagggagggggtggggggggggggagtaggaagaacggggaagaaaggatggagtaggggggggatgaaggggggagaatgggggggggataaagaaaacgaagaggaggggggggcggggagaagatgggggagggggggtgggtgcgatgggaaacaaaaaatagagatggagggaggtagggagggagggagggagggaaagaaaaggttttaaggttttgaaaggacaaaagacattaacattcagatgaatataacttttcatgcattaaacatgtttatgtttctataccactcatttcattaatctcataaacatttacatttctgacttccctcatctgaaaatctcttaagagtagaggcaggcacataatatttgatctggccctaagccttgactgtaatgtaagtgctgtggtccgttgcatatagaaactataggcaagtttactgctattaagacagatttattcatcaggtgaatctttcaaaaggcctaaaaagtccatagtagtcttagactactatgagagcgatttctcccctttcctacaaacaggtgtcacacaaatgtggcagaacttttagtaatcactgagaaagaaaatgtgataaataatcagattggtcaataataattaaggcactttactgctaaccttaggacctgagttcagtccctgggactcatgtgaaggaaagaaggcaggaaggagagagggaactaactgccatatcctctgatccccacttgagcgttgtggcatgcatacatatgtagtatatatgtggaaaggttagctcatactgttcttgcagatgacccaagttcagttcccagcacccacatctggtggctcacatctgcctataataacttcagttccaaaggattctctcttgaactccttgggcacctatattcacatgtgaacccactgacatacacataaataggtgagtaaaaaattttctactttttaaaaaagccagactgaagtaaaacctttaaataaggatgctttgttatttgtagtttcttctgcataatctgattctgtgcgtgcttagagattgggggtttatctaggtggggcacaccccgtgtatcatgtactgttaaaggtgttgtgttaataaagtacccaatttcaactgtttctggatttaataagtaaaatctagataattgtcactgtggtttcttgtgaactggtggatgtttggcatgtaattacaaagcagttcttgcagtcttccagtgtctcgtctccttcagtctattccatggatcgttctctctttcctaacatacatgaaagtatctttaggccaaagggaaccatactagtgagatgcacttaatctcttccttctttcttttaatacatccttatagaatgcattggaaaaatcatggaagcatgttgttttctttgtttgtttgtttgtttgttgctattttgatatattactctgtagaccaggctggcctcagattcacagagatctgcctgcctttgcctcaagcactgggaccaaaggcatgtgccactgatacatgattcatttttattatctctcttcacccttatctggtctacacaggctttaggacagccaggactacatacagagaccttaactcaaaaagaaataagcaaacaaaaattttgtttgcttgtagcctaaactgtcctcaaacttgcagtagttctgtctcagcctcttcagtgctggaactacaaattttcaccaccataccatgacaattaaaagcttagaatctttacctaaagtgtagaaggggacatgtacttaactcccacttcctgggataagtatattagtgtagttgatctagaagcacgtgttctcccctgcagaactgaatgttagtactatataggaaaagggcctttgattagatttgagttgaaaatgtgctaaagtgagcaaagcgatatgcagttgttctgaaccaccactcttcacaaagaggctggagtccttcaacaggtttcgtgttcttgtagtggctaaaatgtgtagatttatgtaactactcactggcagttatctctcctgaaaccacacaaaaatcttgtttccgggtattaggtagtcaatgtgtattgtgttgctagctcgtagtagatggaagaaacaagcggtagttgctttcagaagcttttcctggggcttgtgaggcggagatcctgttaccaagggctttggggttgaatattactcacatttcatgtagcaggtatgtagcacaggctggcctggagcttaagatagcttgccttggcattccgagtatgggattacaggcacgcaccactactcagttcagtagagttcttgaagctagtgattttactgatgcacgaagtcctgctttctctctctgcccacttggttcagctgatgctttcttatttgcaggtttggaaattgagtcaagtaggggagtacttgggtagcatgtgtgaagccttaggattggttcccttccaacactaagaaagcaaagtaatcaaaaaaacttggtttttgctctttctttcttttccttttgacactgaggattcctccaagggccttgcatgataaccccatgatctactgttgggttatacccctattttagttaagagtttctagtactgtgatgaagcaccgtgacaagcagaagtaacctgggaaggaaagggttgatttcattttacagtttgtaatctgtcatccagggaagtcaggtcaggaactcaggcagggcaggagcctcaaggcaggaaatgatgcagaggccaaaggggagtgctgctaactggcttattcactgtgacttgcttaatcttttttatatcacccaggaccaccagcccaggggtagctatacccatagcaggctggccttcccacattaatcgctaattaaggaaatacactacagacttcacccacagaccaatcagttgggacattttcttaatttaggttaggtaagtccaaaatgattctaccttgtgtcaagttgacataaaaactagcaaacacaaataccctactacaagcttagtgtttttcattgcttctgtcagatatgttcaaaaataactcattttaaaattacatttggggctggagagaaggctcagcgttaagagcactgactgctcttccaaaggttctgagttcaaatcccagcaaccacatggtggctcacaaccatccttaatgacatttgactccctctcctggtttgtctgaagacagctacagtgtacttacatataaaataaataataaataaataaaattacatttgagggactagaaagatggcctggtggttaaaaacacttaaggacccaaattcagttcccagtcagtgcccacataggatggctcatagttgctctaactccagctccagaggagtcagtgctctcttctgacctctgtaggcatgcacaccacatgtgtatacattcacacaaacacacacacacagaagtgtctgtttagagactgtatttgaaggctggggagatgactccatcttggcatgtaagtaggacctgagtttagctctctggcacctatgaaaaaaatccaggcatagtggtgcactaagtaatctcagtactagagagggagaagcagaagatcccaggagctcagcctttctaaccggatcagtgagcttcaggttctgtgagagggccctcctctgtcaggaaaatagataggaagcaaccacattcacccacacacacatgcacattcacatgctcaaagaaactacatttgaaagtgtttgttagtggtgtgggtaggtttaagattgcatttgccctgagaagcacagtgagacaggaaggcgttcatagaccctgtgctacagagctgtgaggagcctttctagggcctttctccctaccttaaataggatggctttacttctggagtcatagagcctagtggtaaaggaattctaaaactagaagttaaggtacttgtgatgaatcttgaaaggtgactggttgggtgtaaccaaagttaccaaatgaaaacagaagttttcctttgacattgtgctgcataggctaatatttgctcatattagttacaaaacattaataaagcctccccaagtggagcataattatcttgaaatttttacaaaaacctttatttgatgttaatagcctacccctcaaactaggttaagattgtaaggggaaaaagcattacctggatgactcggcatgtcagtgctcctgtctgtggtctcccatgtctgtctgacggacgctttttacttggctttagttctcgggactcctctttgcccatttctgctgaataagggcaccctttactaaaccttacattaactaatctgttctgaggttaaggaaagagctcagcacgcctagaactttctgatacctcacgtccaggttgctgagaatacaatacactcggcagtgaggcgggttctgtttaagtgtgagaggttggtcaaggtgagaacttattcatctgtagatgaaagaaacttctgaatagaaagggagggatgttctactaggaaggcagcccagattagtgtatagtataatacatgatcttttctaaaaccaaacttgaaaaaacaatttggcggtttcacccctcgctagccacctttccattactggaacaggtatgtgaggtagtcacctctttattaaaagagaaaaatggaacttgtttttgcagtacatgttgctgagctgttactattgttccagctctttcaaacttttttattttatgtatatgagtgtttgcttaaatttatgtatgtgtaccatggtatgtgcatgcctagagagccctcagaggttagaactggagttagagaggattgtgacctgccatgttagtactgggaaatgaacccatgtcctctgcaagagcagcaagttctaactgctgagctttctctccagcatactttttgtctgtgttatggagtgctgcttgtactgcccttgaacttgtgtgtgatcttggattataggcctgtgctatcaggctgggcaaaaagttgtatctggcctacactgtcagaggctccagttcatgatagttggtcaagttgcttttggatatgtaacatcatggtggagagtgtttcagaacggacagctatcttcatggtcagaacatgggaggaatggagttacccacagtcccatttgagggtgtttccccagtaactcaataaccacctactagtctccacctcttaagatccccagcacttcccaggagtttaatgtagtacacagtatttattcttcatgatgtgttaaagaaagagaagtggaccttgtggtgcatgcctttaatcctagcacttggcagatgtctgtgagtttgaaactagcctggtctacattgtgagttccaggctacatgatgggaccctgtctcaaaaagaaaagaaaaagcagatgttttctttctgtttaaagtaacagtgtgtacattccaatctgtggctttctctgctgctgctccaggtgaataacttggggtaccgcctttactcttagtttattttctctctgaaccgtttttccctgttgagctctaattttataccagtagttactatgaaacctttatattttgaattaagaggctcagaactaaatggaatcttgagaatcatcttccaactcaaaaacattctataacagcctatgattacattctgtaacacttctgtgattgtaacttcataaactgataaagtcatttccttttaaactaaatgatttccatatttgctcattttaaaataaaaaaattgagacagataataaactgggactgagaaatctcttcatttcaaaataagccaagactatatatagtgtttcctatgtacatagcttgatgatgaggaaagtgacatcattttgcaaatttctaatgtttgggttcatagaggataactaattcttagccatgctctattatgtagtaatggaaatgaagaaaatctagttttacagtgatagtaaagagggatatgttattaatctctttatagtgtggtttttaaacattggtcttatattgaatggatttgctttaaactgtgcctaattttgacatgttatacatttgttactgggaaaatattagttcattgagttccctccaacttctaaatgttgatagattttatttataatatcaaatagtcattagtaatactattgctacctcactgaagagggagagagggagggagagagagagagatatataaacattttgattgttggcttgaaggctctgtgtcatttgttttcctttgaagcaataggctttttacttgttaattttgaaggaaacctctgggatatggctttagctcttatgtgaagtccttagatttggtttagcaccagaaaagaaatgaaggagaatgtctaacagataccaagctaggatataaaaatgatattattctatggaaggatggcattagtgaacagcaacctaggcctccctcgtgctaggattacaggcatatgctaccacacctgaccagatcgaaatccttttaaattttctcatgaggttttgaactcgggacctctggaagagcaatcgatgctcttaaccactgagccatctctccagccctagaaaatgtgtttttaatctccaagtatttctattactggtttctatttggatcctgtttctgtttaatagcatacactatgtaatttcttttcttctaaatgtgttaagttttatattataatggcctgtatttatgcctcattatacggtctgtcttggtcagggttcctgtgcacttgaagggaacatgtattttgcagttgctcatgaagtaatttataggtgtctattatatctagttgattgatggtggtgttgagttcaattgtgtccttactgattttctgcccctcgtctgcctgattctgttaaataggtgacatctcctactgcggtaagtggactccaacaatcccccttccgtttctgtcagttttccttatgtgctgtggtgaatcggtgttaaatgtgcgcagattgttatgtcttcttggagaactgacagaatcctttcgtattgtctgataagcccttcagtcttcatcagtcacttgtacagttcactgtccagaattagtatggccatttcttgactcatcttacaatggtagatttttgtcggtgggtgtgtggattcagggtctctctctatatatagcccagagtagcctggaactctcttcttttttattctcctgcatgctgagattgtagtgtgtgtcactacacacagtcccactatccatttgtttttagtctgtatatgccttcttaataaagtgagtttctataaccaaacatatataattgtgttgtttctttttttcctttttttttttcttttttgtgttgtttcttatccactctcaaaatctgtcttttaattgatgatttatactactaacattcaatgtctgctacatttgttatgtttttttgtctcccttgttcgttttatctcacttttttgccttttggcttttcactgagcacattatattagtaatactttccctttttatcatttgtactttttcaccttttaaagtgattgccctagaacttgtatattttcagctaatccaactcaattttcttatttttaggtaagttaggtagtattagtttgttatggtttttgttgtctagtcacacacacacacatgcgcgcgtgcgcactcgcatgcctatgataaaataccatgaacaacaacaatgtaaggaaaaacttattttgaactctggatgcagagattagatgtctgtagtagtggggaggacttggcagcaggatcagggattacatcccacctaagtacctgggaagtagaaggtggtgcctcctatacatcggagtgacactataaccctcaaaggctaatcttcagtggcatgccttctccagaagggctccacatcctaaaagtcccatcacctcccaaacagcaccaccaactgagagtcaagtgttgaaacacatgagcctcttagttcttctgttgctgtcaatattattttatttgtatgtactcaaaaatataagagtatatacatatgtagattttgtgctagtatgtgtatgagaactacctgttaagtataagtgaaataaaagtgttagcttagcctgtaatcccagttgtttgggagtctgagggagaaaaataaccattttcaaggcctgtctgggctccggacttgactttaagttgtgtttgcaacttagtaataaattggtttatttgttttgttttttagcattttattttattttctccttgtttacctagcttctaaaatcataaataactcttccatttggccttcgataggtaaggcataaagatctgttctctaacttcacatggtgaagatggtgcacatacacgaaaagtaaacaaaggcaaatttaaaagtttaagaacacatctgcgaggcaaacgtaagcagttcttttaagataaaatatttactgtccaaaaacataaatatctcctaaagatcaaaacacctgctgggccgtggtggcccacacctttaatcccagcactcgggaggcagaggcagaggcaggtggatttctgagttccaggccagcctggtctacagagtgagttccaggacagccagggctacagagaaaccctgtctcgaaaaaagaattttatggttgggggcggtcaccacagcatgaggaactgtattgcagcattaggaaggttgagaatcactgctctagtgaaaacccaggcacatggcatgataattaaggaaatgtaaataaagtactgaacactgctgggggtggaagggaaccagtctttccagtaatcagagaaatgtaaattagtgataattcttttttttttttttttggagggcctaactaatttatagctgacaaaattgagaacaatagcagtatagaagagagtataggaaaatgattgtaaaactattcatggggaagtaaaatgacactttccctacttgggaaggtaggtggccacttctcatagaattgacacgtgttaggttctggaaatccgtctgtaatatatgcatataaaagattgtgtcctagtatctaagttacaccaattttttgtgaaacctaaagttcactaactaaacctgtggacacctgtagaagacgagaaggacttgaagaggaaagacagtttgcttcttcactttagacttatatggagaagagcttcttagcaggcctgagattgctcatcttagggagacctcctttatacggctgcgccttggctgatgtctgggaacttgggcctgtagaagagttcccttgtcacgagtggttctgttctcaagttgtggttcaattgtgtctcgattgctcgggcaatatggcttatgatcaccttccttccatgtaggcgtttagattgttggggtgcacttcttaagaatgcctgtgtggccaggccgtgaaccctgggcaccgtctctctagtgagtttccctgtagacaacttgcttcagggattcttgggtcctttcatttcactgagagagaattaggggaaacttgtacttctgagctttatttcacacgctttttctttttgatgctgttgttttgtatcctttagccatgactctgagtgtgattatagtttggatcacccttgattcttgggcaagtttttttatacataagtattctgaccccttgtttggcacatgactacattgctaccatcttaaaaaggtcagagtttgttggagagccagagtccttggcaagctgaggaagaactgttcttcaggagagaacagatgaacatatttgggaaacagaggctactaggagctggtggaaagattaagagatgaaccggaagaagcctgagtagcaagccagaggaaacaggatgaggttttatttgcacgctgcggggaattgaaccttgggcctcctgatattagaaaagcaccagtgaactgtagccccagttggaaactatgagttgccccaaggcaacaggatttttttttaagaagctgaaattaaaatggaagttttgccttgtgagattgttggtaataaagagatggattttagaacttcacatacgttatttaagacaagatgactgtggcctcgccaccctggatgcactccatctcccagctcttagaagctatgtcagctcaggcctggttagtatttggatggaagggcaagtgtgtttttatttaagacagactactccattttttttttaccagtttcaaatcagtatcattaaacaacaaagatcaaattttaagtagcattttattgatgccagttcattagctgtggtgttctaaatgtgaatatcaacccctgtgatgcgccgggcgtggtggccacgcactcgggaggcagaggcaggtggattggtctacagagtgagttccaggacagcctgggctacacagagaaaccctgtctcgaaaaagagagagagagagagagagagacagacagacagacagacagagacagacagacagacacactctgctttactgaatgcatagaagacactggcattgtcgaggaaataaaaagataatataaatatataatataaataggaaaatataaaagatgacatcagacgctgaattatagtcattggcagtagtgatgaaattaagcgccagggttggtgaataaatcttaaaacgggaaaatcagtcacgtcagtaatccgtgaccatgatgactgcctctgagtcttaaccttctattatacatttttgagttcagtattgactcttgatgactctttagattattgacaacctcctgaaagtaagtttcagtagagttgtaacaggaaaaaaagggtcgttttgggtttttgttttttttttttttgttttgttttgttttgttttttcagaggataagtggtttaccaggaaatgtagtttttctttataaaacttctggtctattgaccacagctctgtggcactccagccttgtaaaaataactattttccatatagcggtgaatttgaactgtttaaactgcagacatgataattggcctctgctatgtttgtttaggcaatgagaaatatctattttactaatttagggctttgatttgtctttttagttgaacataaagagaatattattgtcagttaatgtatagcagtgagtcttgatgttcttaatttttttaatggcagttactttagtatcctatgaaaattggtgacttttcttgaaggtaagatacatcatcaccatctaaaggaagacactattaggagccattgttttcatgtattgttggagacagggtctcaagtacacaaggtgatctctaactccttatgtagcaaagacttgatgctgatgggtgagaagggtggggggagacagggtctccctatgtagtcctggccttcctagatggaactcacagagatctgcttgtttctgcctcctctcaagtgctgtgattaagggcatgtggtacaacgttgaacattgccttaaatttttaatcctcaatgtcctaggcactggatcaccactacacccagatcaggaaccaagttctgaaaaattcacttcatggacagggagaaaaagagatcattggagttggaatttacttaggagaatcagtaaacattggttgcattgttcagtgaacagaggcattagatagaaagaagatgctggtaatagaggtgagcctgccccgtgacttgaacaaacgcatttctgtccattactttataaaatacatctttcttttttaggtaatgttgtttaataaaactaatatatatggcaaaattatattagatttgtttactgtttgtggagtgtgagtgtacatcacagtgtcacatggagatcagcaggcaactttcaggagtcagttcttctgtcacatgggtcctggggttcaaactcagttcatcagacttggtgggaagcacctttatctgctgagcaatctcactggcccaaaaggcacaattttattaccctgctgatttaaatagtcttttatttctataaaatactttcatagtatggaaaggataaacttagattaaaagtttgtgtttctagctgggactggtagaacatattcgaggtaccaggacttcagaggcagaggctgaagaatgtctcctatgagttttggtgataggagctgccgttaataaaatgtgatgccctggcctacgtcttcaaggaattctagttataccgagggtggtgtgcttgtgtactgggttgtgacctccattagcggtccatagaaagagctggggtagagatgaggaagcagttgggaggaagtggatgacaaagtgttacaacagtactagtcttagggaaatgtttgacgatgatttctattctggtgtactgagaagcaaagacagatggaataaatgaaccagagaagtcagctagggcaaagcacacagtgaattgggttttttgttttttgtttttttttatctaagaaaccccgagattctcctttattttcctcagttatatccttaattaatcagtcctgagttacagcttcaaatgaaaaaacaaacaaaaacaggctggagagatgactcagtggttaagagcacagacctctttttccagaggtcctgagttcaattcccggtggctcacagccatctgtagtgggatccaatgccttcttctggtgtgtctgaagagagcaacagtgtacttacatacattaaatcttaaaaaaaagaaaaaacaaaaaaagcaaaacgtggtgcttttttgccagtttcacctgctgatatacagttttgttgtgtttgtacagagttggataattctagtactttccaacagggtcttaaacttctttcacttggacaccagatatatacataaactagatatatagatcaagcctttactaatgatgagtcataattcttttttttttttttttttttttttggtttttcgagacagggtttctctgtgtagccctagttgtcctggaactcactttgtagaccaggctggcctcgaactcagaaatctgcctgcctctgcctcccgagtgctgggattaaaggcatgcgccaccacgcccggcataagtcataattcttaaaaacaattctttggcatgcatttgatcttactgtttgttaaactgagagtagggctaaggacatagctcagaagtacagtgcctggcattggaatccacactaattaagggattaagattagagagatgtatgtgctaataaggtagacacttttaaaaaaaatttacagtgtgtatgagctggttagtctttattgtcttcttgacatagcctagagtcacttgagaagaggtgacctcaactgatgaatttcccaaggagattggcttgtctgtgaccatgtgtttgaaattgccatgactgatgtggagggcccagctcactctgcgtggtgccatccctaggtagttgggtctgggctgtataagaacctagttgagcatgaatcagattaatctctatgtcttctgattcagtttttgcttgtgctccttccctggcttacgctgtagcctgtacgatggaagtaaacccttcctctctaaggaatcatgtttgtcatagcaacaagaagcagcgtgtgggggtgaggggaagggagggagagagagcgagcagcagaatgcctgtgctagtttatagcatgaatatggagataggataatttgtgtgggacttggttctcttctaccgtatagggtctgtagatggaactctggtcatcatcacatttgacaacagtacccttagcctctgagctatctaacttgcctgtgcttacattatattaagaaatcctggctaaatatttgctagtgtagctcatagagcatcttcattgtttttcagaggtgataaaatttgatttttataattgtttgtgctaaaaatatcatttcacatatataaatagtacaaatatagtacaaatgataacataatacttggggccgtctcagaaattgttctaaattctctcttgatcccaagctaggatattattaagtgattttttttttaatgaaacataacttagaaactcacacagcagttaggggagccacatgtgaaggcacaggaatgtgtgcatggcgaggtcagaagttggcgttgggtgtcttccctctatcactccccactccgttttgagtcaggccatttcattgaacatggaacttccagttcatctagactggctggccagaaacgcccaggggtctttctatccctgcttccccagtgctgggattccctgtgtgatctgctgagcccagccttattacatgggctttggagagaagcctctggtcccatgccagtacagcagcactttaccaagtaagtcttactggtttgattctaatcaagcattccaagcaagtacggtccagagatatgctaatttgatagttacgtgccaattaaagtctgttttctttaattaaaccactatgtttttatagtagctgaaaacttggtgtgtacgggtaaaaacaaaagcagactacagttcattacatgcagtagtctgagatgagtagtttcaggtaatgattacgttgcttagcatgaggtcacacacagtaaaatcagctgatgcgtgcattacaggtgagcacagccagagcctcagatgggctgtgcttgactcgggcgtcagttttggtggttgagcttttagaaccctgttactgcccagctttcctctcaaccacattcagccctgtgacccctgagttgtaagtagttttcccacgccattctcaggacattgtagtccttctgtttctgcccttttattgttatagcctgagctttcccttcatttgttacacggctgtggtaccctttcttccaccctctccagactttctaaactacatgtttttttccttccttactaatttcttctccaatttcctatgaaaagtctctaatcctctttctcagaattatttgatactgcaaacctatatgtaaaataaatacaaaggaacctaacagttgaaaataggattctgggggctggagagatggctcagcagttaagagcactgactgctcttccagaggtcctgagttcaattcccaataaccacatggtagctcacaaacaacaatctgtaatgagatttgatgcccttttctggtgtgtctgaagacagctacaatgtacttacataaaataaataagtctttttttaaaagaaaggaaaagaaaagatgagattctgttttatcaagctagttagtcagtactccttcaaaggcttggtcaggcattcagcagcagcacctgttaattgattaagaacgaaagtgttctggttaattgaccgcagaccttttgactgtctgggacctcagcagtctgaccttcctggtaaactgctttacattatacagccgttccaatcagacaaattggcccagaatatatttttttgataatcagtctaagaaatctgaagtaacaagtcatacttaaaaggttttttggctaatagtaattaatgattattgagtcattctaggcgccagcctctttgctaagtctggaggctttatctgaattctataaaggttataacactggattgaatgtgttcattatcacacattatcaaaaccaaaattttaattactgcaactaattgtaaggctggctatatttttgataggtaggaataaagtgtctacttaaatttctttttaatacagcttgataaacttcttgatgttgacttttcaaagtgcaaaacaaagttttattctgttttatgttgaatatcttaatttaaatgatggtttttaagatactatatttaacttttatatataagacttaatttacatataataattatacatatgtcttgtacagtgtgacatgtatgtatgtatgtatgtatgtatgtatctgtgcctgtccatacacatgcatacatataaaatatgcaatgaccagatcaggctgagtatactactcaggtagacgctagggtttttgttttattttcataaaacatccattttaaagtggaatacataaagcattctgtgatatgccagaccttaagaacattggataaataaaaatttaaaattaaatatttacttatgatacagagacattcttaataattatcagcttttacataaaaatttagtaaaatatttctcagtaattatcccataaatgaagtgcttggatgatgcagcaggtgctcgagaagtgcgtggcattttatacttcaccttggtcgtcgtcctccttcctttgctcgtagttcttttcttagtaagactgatgaagtacatttctcttctgccagtgctgctttggctgtttaaattgacatccttctttaaatatgattttcacataatactttatattaaagtaaataacttgaaatatatcttttcagattatcagatctttgagcagagaaagtagatgtgcaagacgtgattgctaacagggaatctatgagcatccgtttgccttttctgttgctctcctttacatctgatttttgggtgttcgtacaatctgaaaatataaaagacacacggatctcttcactgtccatttcccagcattcccattttccttccaacaactgcaaggtttggtattagatttcttggggacatgttttatgcatatgtacaaacagacatgttttaaatttctttaatgctaatagtggaacacttgtgttttcttctttttacattcagtggagatttttgacatggtgccatattcctatatttaagacagagcttccttacttgctttctagccacatcatatttgattgtatgaaacaaatttatccagtcctattaatagggtattttttattgtttgtggacttctgctactacaaacattgcaatacacacctttgtgcatactttacttcatgtgtgccaattagatctggagggcacatgtgtagaaatttaagataggtggatttgtaactgccagctctctctctccttgtttggtaatgttctttttggacctacattgagctgaagtctcattattctggtgtagtccagtgtcccagtcctgtgagtgctagggttgcaggcataaggagacctgggtagtttacacatctatatagtttgagatttttacctctataggaaaagttaccataagcgtatgaatttttactttggcattgtgctatactggcacagcatgatttttgttaagaggagaaaaatgaatattcttgtgttcagactctataaagtatagtcttttttttttttagtaaaacaaaaataaccatttacagtgtaagtgcctatatgtaaaattacttaaagtaatgatataacaagaataagacaagattcttgtgtgttaaaattctctaattttaaaaaatatggaaaaaatatggtcacgaaattcttaactgcttgagggtcagcatcacaggctataaaaataaactggtgaaaaaattaaattgctaccagaccttttttcatttcttttgcatttaataatgagtcctaaagtcaaaatgctttcaatatgcctttaatccttcaagaaagtaaactactttgaaattaagttttagaaatatagttgagtagaacctaaacaattcacaatgccaactttcagttctgctgaaagcaggaagtgtattactgacaagcagaaatattccagcccaaagaacatccctactgccatatgtggtaagaatttgtcactaacccacaaaccacttctgtaattcagtgaataagcagaattagtctttgttggacatttccagttcagtgtgaaagaactttgttttgcagtgttttacaagtaactattagcatgtctttgagagagcctggcacatcctgggttctcctgcactagtgagaggggaaacctgtgcttaattccccgagtacgattttaaagcttaaggagaccttattaaacacagaaattctcatcttattaatgtctttaaatagaattacttctagttgtgcccccttgctgctttaataaatattaatctttgtttgcacttactctaaaaagaaattattcttagggttaattttttaagtaatagggaaactaacagcttagagcaataggagaattaattgtgaggaattgggtcagcagaattcattgaagagctctttgtaaatcattaacagttttgaaaataccaatgtttctctaaacttgaattttattttcttgtattttaagcgattgagaagattgtctaccaaatatagaacagaaaagatttatcccacagccactggagaaaaagaagaaaatgttaaaaagaacagatataaggacatactgccatgtaagtttgaaatgcccttgatagaataaatagaaatgctatctagccctttgtcaccccacgagctgttcctgaactgaatagctaaggaggtagaatcaatccttcccaaggtacactgcagagccatctgtggctgtgcttcttagactccgtttcttctcgtggagcagtttgtggttttgttttggtttgttttttactaaaaacaaacaaaagaaataaaaagtaatgtcgacaattgggatagtttcttaaaacactgatttacctgctacctgattataaaggagccttaattgattgattaactgtggattaaaaatgggccataagatgcctcagaaacctgtgtctgctatcctcagcagtctgtgtctcttaagcatgtttcaagttgaaaatgttatattctcattacaattatatgctaagatactattgttttctagctaagtaactgtaaacacatgcttaagtcagagtccacattctaaaaaggtatcttgtgttggacatgcattttctgaaagctgctgtagtgtttcccttccagtatctattctccctaacaccatttccttaactgttgctattagagcttctctctaaagtgtccttatgtcacagggacctagtagtgacctcctagacccagtgctcttttccagggttttctttcctgttagtgttatgccattggcagtctattttctgagtttctcttcttccatgataaccctctttcagatcatttcctcctgctcattccctctgttccactgatttcttgtgtgcatgtgtacctatgtgtgtattggggatggtcagaagtcagccctcagtgtggaggttcaggagccgcttctggttttgtttttctttacttgagattgggtatctcactgtggtgtgggcttttcagttagactagactacctggcctgcaagcctcagggatctgtctgccattgtccatctccctagtgctgggagcacggcaagcggtttactatctgcgccatctctccagtcctcctcactagtttctgtgcctaaatttaatcctcctactgttaactgttctacattattctcatctgaggattgtgtgattagacactattaataaaattaacaaagaactgcacagagtaacagtgatgagttaccactctggaagtcttgtagctgtgagactcaggactggtcttcactgtgtctggttttctcaattttaagttgaagttggtagtgataatacatctaaggcctgctttggatgtttaataggtcagatgtcttttactaacccaacacagtaaccactcaaggcttttgctctaaatatactccactttccttaccaggtgctttagtctgttcaggctgctgtaacaaaaataccataaacttggtggctcataaacagtggaagtgcattgagagaagtccagaatcaaggcatggtatgccgtgagcactcacccaccgattcatagttggtgccttctcactgaatgctcgtggagaacgaggagcaaacaagtttccttgggcctctttttatagtgacgatcgttgaactcattagaacatgctctcctcacctcctaaaggcttgtctccttgatgctcttgcattgggaattaggtttcagcatatgaaccttgtgggaatacagtcagaccatagtgctaatccttggaataagagttgtcttagttagggtttttgttttgtttttcctgtgaagagacaccatgaccaagcaaactcttaaaaaggcaaacattttttttttttttaaagatttatttattatatgtaagtacactgtagctgtcttcagacaaaccagaagagggcgtcagatcttgttacggatggttgtgagccaccatgtggttgctgggatttgaactctgtacctttggaagagcagtcgggtgctcttacccactgagccatctcaccagcccaaaaaggcaaacatttagttggggctggcttacagtttcagaggctcagtccattatcatcatggtgggaagcacggcagtgtgcaagcagacatggtgctggaggagccaagagtgctacatcttgatccgaaggcagcaggagacttttacacaggcaaccaagaggtggggtttcttctgcactgggtgaaacctgagtactaggagacctcaaagcccacctacacaatgacacacttcctccaacaaggtcacacctcctaatagtgccacttcacatgggccaagcatactcaaaccaccacaggagttaattcagatttctggatactttattaaacataattttcagtactgtccactgatgtcttttcccccctctggtctagagaaataaatcttaactggctccaggtttctgtctcacattcatgttacagaaagttgtgagcatatactctgatgatatagaaaagaacgtgcagaagtctctcattttgttatttcatgttctagcataggtagtagacagtgaatacaaatgcacataagctctgtcctctggttgattagtactaatagggataatgtagaaagggcgagggccattgagaaagctggaaccaaaggaaagcatcaggttgttaacaggagggaggtgaattttagtggcaggccagccttccaaaaaagaaagccctcctttatattggttgctgatttatgtgattgacccacacacacacacacataatcacaacaaaaccatggcggttgataatataccatttgtaggtgggaaactgagcctggagaaagctaagtatttatcacagtgctcacataatggacaatagtttgtatccaatgccatgatattcagataagatggttgtggcacttaaggatatttggcagtatttgaaggcatttcctctaccggcttctagtaagcaggctcccagggtaccagtgcaatgtaatgtcctgagaacagacttgtctaagctgaagttgagaaacctttagaatggccgctcttcatctgtgtgttaaagtcaggaggacctggttcacaagtagaatttcaataaatttctacctgttttgatttgacatgtaatattgaaagtacttacatatttcttagaaaatagtttgctaatttcctttgaatgtttaacatgtccattgttgcataagcacacttttaaacagctttaacatacagtttctataccatgaaacgtacccattttaagtatataattaattttcaaagtaaacttaggtcatgcagtgactaacccaatccagggtttggaaatttcattactttcaaaagttctgtatttagtcccaggcagctgctagtattctttcgggttctggattttgttctttaagaaatttaacatagctgtcatttcatatattatctgtggtgcttgatatcattaactcagcacgttttcttgttatatttgtgttatggtagtattggtgtggtaaagatttttgtataaacacacttttattcttaagtgcatatgtaggaatatcattgcagacctacagaagtttatatttaacctttttggttttatgcggcagcaagttgctgtgtagccgaggctggattctgaattcttactcctcctgcctcagcctgtaacagtgaacctttaggcatgtaccacaacacctagcttctgtttagctttttaagaaaattgagataaatgtatttcaaagtcactatcctgttttctatttccaacattagtatgtaagcaccagttgcccacattcctaccagcactcgtaagttttggatttttgcttgagactgtgtctgcttggtattaagctgctagctacaagcatccttccttcctcagcctcctgagcagctgagttagaggtgtgagccattgtacttagttagctgcaggactttccttttctgagtgtgtacacctgttcacacgtgcttgtggaggcctgaggtcaatgctggcagttttcctcagttgctcttcagattgaagcaaagtcttaatgaagttcagagctcactgttaaggctagtcccactgtctagctgctcatatgtactcagcaagcactcagctgcttcaaccacgagacatcgtcccaggtccagacttctggtgatagtttttctagtgcttcttgatgtgtttctaatttgatgtgtttttcatgtgctgttagctaattctttggtgaaaagtcttccagttttttaaagaaaactttattttaatcttagtgtgttataagaattcttttttagaaccagtaaatctaagaggtcctattgttagaaaaaaataatgaaagataaaatatttgttattttcagttctgtccaaatgaaattatagataaagtttattactgtggatttccagtggaagcaaaaacaataaaccatttgcaatcctgaaaaaaaaaaaaaaaaaagaattctttttgttgttcctgcttgggtttgaaatagagatctcatacttgccttagcctcaaaccttcctagtgctgggattacaagtgtggattaatgtccaacaagagttcttaatacatcctgaatcctagaaactattcccagaattaaatttctctattagataaaaggttacttacctatgtttgtttgtttgtaagggctaaaagtgagaaaggctttggagttggtgaaatggaaatagtctgcctattttgttgttaaataggaagattatattacttcacattgtgtatggttaaactttttcatcttaagaaacttttaagagtaaggaagaaattcccaccttgcacgtaggcagcctaacatgtaggctaaggatcttaactatcattttggaaccagttgttgtactctaccttagaggtactttgactagagagtggtatgccgtatggataacagttattaactgggaccccttattactggcgaacatagtaagaggaagcatttacagttagtcagcattatcctgactgaatattctagcctcatgtatcagaagcagcatttttggaacatctattttcttttctaaatggtactttaaaaagggaagccacataatgtgaatgaaatcagtgtcagagcactagcaaacatgtaaccattttagtgcctgaaaaatttttagagatagtttacatagagattattcttatgtctgtcttatatctcttcctacaaatttccaaaataaagattttatcccccaaaaataagaaaaaagaactttagtgctttatataatatttgaaccaatgaaaaataagttactcattgtagttggccttgtaatagtttagtttatgcatagctgtttccatttctagtttttctttttgtatgttaattggctttctgattcattgtggattaaaaggccataatgtgatagtcatagttacagtgtacatattctgatcctttctaaaccaaaggtagtaattattaggcagctctaataccttaccaaccagatgtctgaggtttctttaaattacaagtaataagatgtgtatgtacctcaggaaccaccctgtcttcaaccatgaagctgtacattaagaacaaatataattctgtagtattctttttttctttatgtatgtgagcatgtacatacatgtttgtgcctgtgtcggtttatgtgcaccacatgtgtgcaggttctctggggaggccagagttcatcagatcccttgaagctggagttacaagtggttgtgagccatctggcaggggcattgagaatcactgtgatcctctgcaatgcagcaatggcctataactacccagccgtctcgccagtctttagtcttatggtattagtcccccaaaatatatagtttcctcctggtcaaaagtcataaattaggaaaacttgtaatttgaagagacaaagaagaaggaataactaaatctatgtgtaatcttagaaaacatcaagaaaattgttacttaatagttttataactgaattttctgggtttgataattatgctgtatttatataggattttagtcttaagacagaaaagggggctattcctataaccccagcacttaggaggctaagtacaaagaatcatgagtttggaggcagagacaggcagatttctgaattcgaggccagcctggtctacaaagtgagttccaggacagccaagactatacagagaaaccctgtctcgaaaaaccaaaaaaaaaaaaaaaaaaaaaaaaaaaaagaacataagaatcatgagttcgaaactagtccagactgtatagcaaggtcctggttgaaatattcctacccaacacaaatttgtagctattattagaaatctcagtagcagttagctataactctacattatttttgcaatttctatctaaatctaaagtcatttctaaatatttattatagttttttgggtttgtaagattttggtcttttgttgttgtcttgaaatagggtctctctagaacttagtatgtagaccaggctggccttaacatagatagaggcttacaagatgactccatgagctaacttacttgctgccaagcctgacgacctgagttgtttccagagtccacatggtggaaggagagaagcagatgctgcagtccattctctgatacagcccatgtggcacgcatgttcaatactgtcccatgccctcatatacacataagtaaacaaacatagtttgagtaaggatttacgtaactcattaatgcacagcaaaataaaacaaatcctgatattggatcgtaaaagattgagggttttttttttcttacatgtctaatttttttccaatcatgtcatactttggtatcttaattcattagtcatgattacttagtttttataatttctgtgaaatataaaagataggtttcttaataagaactttaacaaagaaacaataattatgaagttctgaggtttgagctggggagatagatggcccagcaggcagcaatgactattcctccagaggactgggtccagctctccagcacctacatcgtagctcgctgtcatctaacttctgtggtcattgcccacacctgcacacacagatataactgcaggcaaaacacctatacacataaagttttattttgtttttggtttgtttgtttgtttgtttgtctttttttttttttttaagatagaatttctctatgtagccctgtatgttatggaacttataggccaggtggcctagaactcacagatatccacctgataatgctaggattaaaaacaaagaatcaaaacatgctgaggtttaatccctagacaccaccctagttaatttggatcaatccctaatgttttatatttctaaagttccagagataattctggctgcatctttaatatgcttatttacatttttttttgttccttttctcaaaggtttatttttttgttaaaaattaccttcctggtacctaaaacttcactttctattttttaaagtacatgtgatatatttgtaatcccagcacttggtagctgacaacagttcagtggctttgtgagctacattgaggccctgccacaaaaagccagagaagaaacgctcgcatgccacctggatataagtaatgaaaatcttttctcttttgtagttgatcacagccgagttaagttgactttgaagactccatcccaagattcagattatatcaatgcaaattttattaaggtacgtatgaaaatgaaggaaggtttccttgctacacttcatgccttcccatagagcgattttatcaaaggtattaactacccaacatggtcctaataggaaataaaagaaaaccctgtcttgcacgtcctatttgcttttcttgtagctacctatgccacatagatcaaaccatatatagattagaagagacagttttctgtgtgctacttttacatcaaaggcttataagcactgctaggtcattatgtaaattgtctttcagtttatgtgtacctatatattattgaaccatatgatagtttccaattttccttagtagtgaaattataatgaacactgttcttttgaacaatttcttaggatgaactaacagtgctgaaattactaggtgatactgattttaatttataaaatataactgaaattttaaaacctttggtaattgttactatgtgtgttgacaactctgggccactgtgtacctgtgatcccaacatttgggaggctgaggtcaggattgctgtaaatttaagaccatcatgagctaaagaatgtggctgtcttaaaaataaaaaaaaagatataaacaaatgaatatgtaaataaaacagcatatatataaatagatatgtaaataaaaacaaagtggtaggcatcttgttagataacttgagttatacttgaaccatcagtggtagctaggtaggtgggtgggtggttgatttgagacacaatttctttatgtagtgcagactagcttggaacttgaaattctcttgccttgcattccctggtagtgaggatgtgcgcttgctctactctgcccagcctgtcagctctctatactgttatcaagaaagagatgcagcctcctgtgagacttgtgtttaaaggctctaatgtgttctataggctattttgtgcttttgagtctagttatacaactattacagcttttcaatgacttatattatcttattgataataaacgatagtaagagtagaaaagtaaatttgacttactgataaattccaatgtgattttcacctccagtgtaaaggtgaactgtaaataatcctgcccgtgtttaaggaaggaagctttgagctttcctagctatcctctccagactccaatggaggtcatgaagaagattaccagggatctcagagcaacaaaagtttttaaatgtttggggtgagcaagcagaaatgtggccctctgtcctacccaataaagctctgtgaaatttgcaaaaaaaaaaaaaaaaaatagaatagaaaaattaatattgtatttataggacaaatatggtttggggttaaaaaaaatctttttttttttttggttttttgagacagtgtttctctgtatagcccaggctgtcctggaactcactttgtagaccaggctgacctcgaactcagaaatccgcctgcctctgcctcctcagtgctggggttaaaggcctgtgccaccacgcccggcaaaaaaaaaatcttttaacaaaataaagttagttattacactaagacagaaatttatggattaaacaaacaatggatattttacttcaaatactgtcaatatatacattttttatgggtgctaagttctagatttgttttgtttgttttttaagacagtttctctgtgtagctttagctgtcctggagctcactctgtagaccaatcttgaactcagagatccacctgcttgttcctcttccagtgctaggattaaaggcatgagccattatgccctgcaagagttctgattttttttttttaagatttatttatttattatatgtaagtacactgtagctctcttcagacactccagaagagagcatcagatctcattacggatggttgtgagccaccatgtggttgctgggatttgaactcgggacctttggaagagcagtcggcaccctttaaccactgatccatctcgccagcccaagagttctaatttttaactactcttagggcactgattcagttatatcccagttcatttattttaatcagatatcttgttttatctgttcttagcttactaatttcaaacccatatggttctgagtatgctctcactttgagtaaattcttaaggtggtcatgggaaaagctgctaactagtttcgtattcttagattcaaactgtacttttgtgtttctgctatagttaactctctctctctctctctctctctctctctctttctctctctctctccctccctccctccatccctccctccctttctctctttttctctctctttcttttttggctaggtattaagtttttgttgttgttgttgtttcctgagtcagagtctctcagttatatagtcctagctgtcctggagctgtgtaaaccaggctggcctcaactcaaaaagattacagagtaataggcctctgcctgctgagtgctgggattaaaggcatgcaccatcatacccaagattttgtttttatttcttagtacgaagtaagttttaattgctgattctgtacaatatatccagtaaattagcaaaagctgaaatgaattggatatatttttgccatgttttatactctaaaagaaaaatgactcttgatgaaaacattactaataaaatttgaaaccttaatgaaatattcttgataactatagtaaatgtaaagtttacctttcactctttcagggtgtgtatgggccaaaagcatatgtggcaacccaagggcctttggcgaatacagtcatagacttctggaggatgatatgggagtataatgttgtggtgagtgacttgtcatagattttgagatctatatgtttaatgaccttatgtgtcttactgagaaagaagtaaggcaaccttttttttgtataatttatttttattttatgtgcattggtattctgtccgcatgtatgtgtgtataagagtctaaagcccaggaacagagttacaggcagttgtgagcttgcatgtgcctgctgggaattgaacccaggtcttctggaagagtagccagtgctcttcactactgagccactccagcccctaagaatcttctgggtaacctttgtgttgtttttaatgattgtattcatttttatttattgtgaattggtattaggtttgtagatatgtctttgtgagggtgtgagatcctctggaactgcagttacagacagctgccatgtgggtgctgggaatttgctgccatgtgggtgctgggaattgaacccatgtctctgaaagagcagtcagtactcttaacctctgagccatctctccagcccctgtaaaggcctagctttttaggtataatgacctaagtgtaattacatttctagaaaagacaaaagctacttttgaagatggctcattaaattctcacaaagtagttcacatattttaagaaaagcgtgactaagtcgggtgtggtggcgcacacctttaattccagcacttgggaggcagaggcagacagatttctgagttcgaggccagcctggtctacagagtgagatccaggacagccagggctatacagagaaaccctgtctcaaaaaacaaaaaaacaaaaaagaaagaaagaaagaaaaccatgactatagtttaaattttgtcctaagccaaccaatgatatagctagtaaataactttaaaatcatttttcaaagaagatgaatgcttgcatagaccaacgaaatgattgatagtataggtatgctcttttaaaaaaaataatatttttaatttattgtttgagaaattcatacatatgttcagtgcatctccatcatatttaccttctactccccttatctcgcccctcttgactttccctcctctgactccacctaagggtggaaggtgatcgatcacccttccagtttcttcccttagtgcttcttacaagcacaccaatgtagagccatgcactgagcctgctgagcctaccgaagcctgtagccctcgggaaaactgactcagcggtcagagcacgggctgctcttccagaagacctagttttgattccccgaagccacatggcagcttacaaccatctacaaccccagttccagggccttctgtgacatccttgggcactaagcatgcatgtagctcagatatacatacaggcaaaaggcccattcatacacacaaaatttaaattgttttaattaaaaaaataaagaagaagaaaagactgttttccctcccacgcagccatcagttgtctgcatcttctcaaccaggagtggggactccatgtgcctgtcttccattcgtgacagacacatctttgtttctttctttttcttttttttcttttgtttttattttattcacttacgtcccaatatctgcttactttttcctcccaatatcccctcccacagaacttcccctcattctcccccccccttctctttgagatggggaccccacgcgcctcagtacacacatcaggtcactacaggactaggcacatccgctcccactgaggccagacaaggggaacttaatccacggtcaggcaggcaaaatactcaggaagagcccccactactgttgttgttggaccaagctgctcctctgctacatatgtacatggaggcctaggtccagcccgtgctcgctatttggttggtgattccgtctctgggaagccccaagggctgaggttagctgactctgctggtcttcctgtggagtccctgactcctcccccagctcttccacacgactcctggagctccatcaagtgttcagctgtgggtctctgcctctctttccactggctgctgggtgagcctctcaaaggacagttctgctaggttcaacagccatattttataacttttgtctgaaagcaggatattttgggtccttcctaggaaaatagatgtaaatatattaactataaattattaagtaaaataagttattataaaagaatgtaaagaacctctctcctcgcccctggtcattcagggggatgcatatctgaactactagcattttggttccctttggcttttttggataaaggggaatagtgtgcccctaggtttgaaagcaagaaactggcttacaggatcctttggagcgtcgtcattggaatccacacttgtgtggctgtggaaagtccgtgacaaggagctctcattactttctcatgaatgttacaatggctttttctgtgatgttgcagtgattctaatgcattggcatcctccgctgtccctttgagattattaagaggggaatgcaataacagtactagtgtttgctgacagtttcattttaaagtgagatttaaagcaggaacacattttctggataatggcaacatattatgtctgcatagaaggttgtattttcagaagtatgcatttgccaaaattgggagaattgtcacttaagatttgtatttcattgttatgtattttcaagataaaatattccattaaacaaatattgagctctagataatatgcatgctgagttacctagtagactgatatctactgtatactaaggcattgaaatacctttataaataaggtgatagaaggataagtatgataattgttataatagtttaatgataacagcttttactattaaaattttcaacttttatattttaaatataaaatgcttctataaaatgaggaagcagatagaacttttatttagaggttattaattttaataaattcaaccttttttaaagttgtatttaactgtgctttaatatttggttaagagtaatactaaattaggttaataccctaacagtattttagtataactcaaaaataagaaataaatgaaccagattagagtttaatccaaactaagtaaatcattttaaatgaagtcacttttatttagtttttgtttagaagatgtgattttcatagttcatttatcttatgcttattcttaagattttattcttatgtgtgctttgcctgcacatacgtttatgtgttatgtttgtgcagtgcctgcagagatcagaaaagggtattgggtcatctggaactagagttacagatagttactagccaccatgtgggtgcagggaaccaaaaccaggtcctctagatgaacagctagtatcaaggaaacttttgctcagaataaaagataattattgacatttgtatttcacttgaaaagtaaaactatttttaactgatttttttttttctctcccaccccaactccttcttagatcatcgtgatggcctgtcgagaatttgagatgggaagggtacgttaacacatagtgtttggggaataggagttcctggtcatttattacttcggttatctgatcccatgtagttaaagggtatgcacttcttttttgtgctctgctattttatatgatacatggagcacaaacttctgtgtttcagaaattcattttataatatactaaaattaagtgtattgttatgtatagttttcaaatgtttcatgatattttaagtcaaatgtaatttattgtctagaaagtaatttttaaaatggtagtaaaattgaacattaaagtagttctggtggtcagcaatttaagctacatatgatgtcatacacttggaatgccaacacttgagaggcagaagcagggagcatgccacaaatttgaagccaagtcagtttacataatgagttctaggccagttaaatctgtatgagatcttgtctcacaatttaaaaagaaggatgatcttaaaaatagcatgactattctgataagtctctttgcaaaaactaatctttctgtatgagtgtattgcatgtgtgcatacataggcatgtgtatgtgtgtgcagatagagtcacatgtggtatgtataagtatgaaaaaccagaggtcaggaccagttagtatttttctgtttgtctgtcccttacttcccctctgtccttcttgcttgagataagggtctctcactaaactgggagcttaccatttcagcttcaccagctggccactgagtgtccagaattccatctgccctacagtataggcggatatactatgcctgaccttacatgggtgctgggctcaaaattcagctctgagtgcagagcaggtactatatctgttgaaccatcttcccagccctaggactaaaatatttctaaaagcttaagaaatgtcatacagttactgaactttgttctatttatattttttgcacaacagaaaaagtgtgagcgctactggcctttgtatggagaagatcctataacatttgcaccatttaaaatttcttgtgtaagtacctatttgtatgtgttttaaaaatatttttaaaaatttgttctttgagaatttcatatacaagtacaatatattttgatcaaatctatccctgcccccattttccaggtcctcagactcaccaactatgtctttctcccaacttcatgacctttttaatctactgagttggtgcacatggtgtagggcagtaaactggagccatgcaaacaccctaaagaaaattaactgtccctgacccagcaaccaacagctggcaatagcccctccccttggagtaggactgtataagcccctcctcatccatgttggaagttgattggctctgtcttgttcagggagctgccactccagtgttttcagtgtgtaatagccctgttacacccagtttcatggccgtcctttccaaccttgagcttttagaggcttcctgcttgcccatggtggttcctgagccttgtggggaggggtcgatatggatgtcccatgtaggtgagcattccacaccacttgctctttgctccttagtcagttaagcgtctctgtatttgcctctctctacagcaggaagaaccttcctggttgaagcttgagagttgcactgatggctttatgtaaagatcagtttggaaggctgtttgtccatctagcaaagtaatagaagtggtttctcccctagggcatatgacctatccagtttacagtgtcaggcttgatttccatcctgtggagcagaccttaggttcaatgaaaaggggatcctataacattcatgccacaattacaccagtagtcttgttttgccaggtcagctattgtagctcacacagttcacagccaggtaagacttacaccatcaatacgtatcaccttttctgcattataaaagcgacacagtggagaggatgcctccacatccacagtacctatttttatatacatgatttcatcagaaaagccgcattgttgactgaacatttaaattgtagtatggtacaaactcaggctattacaagctaggacttaattccatgcagactttcacttacagtaatcagtactgatgttttaaactgctttcagattcaggaggcttaggaacaactttttcttttttttttttctttggtttttcgagacagggttactctgtgtagccctggctgtcctggaacttactctctggcctagaactcagaaatctgcctgcctctgcctcccgagtgctgggattaaaggcgtgtgccaccacgcccggcaggaacaacttttttttttaagatttattcatttattacgtgtaagtacagtgtagctgtcttcagacacaccagaagagggcgtcagatctcgttacagatggttgtgagccaccatgtggttgctgggatttgaactctggaccttcggaagagcagtcgggtgctcttacccactgagccatctcaccagcctcctaggaacaacttttacaactgttattttctttacttttatgatgattctgttagtctttttacatctcttgacaatgtacatgtgactgtttctttggaggttgatatagtcacttctgatcaaataaatggaaaagaacattgctaactgaggtatatcatgctatccttcctcacattttaaaattaggaataaagttaaatttgaatcctgaaagtaaagattattctttacagcaggtaacttgacatgagcctgaagtgtaggctggccctggttgatgctggaattccagcatcactaaggaggattgttcaagtttggcctggtctgtgtaacaagttagcagtgattctcaacctgtgggtcacaacccctttcataaacctctgtctccaaaaatatttacactacaattcataacagtaacaaaactacagttatgaagtagcaaggaaagtaattgtatgctgggggtctccacaacatgaggaactaaattaaagatccacagcactaggaaggtccttggtgcagggttgacgtgggagaccatttagtgacctctggagttaaactccagttcagatactaccacagtagaaatttgagaaaatgaatgaagtgattcccatgctagaattatagtggatgtctattttattaatgaatagcatatattgtccttgttaatgacaggactaaactgtctgtggttacaactaacaaggcaaaaccaagaactcagcagcagacaaatgtcaggctaatagactcaaagctgtgcatgttcaaccataataaggtaataactaagggtttttctccccacattgctgctcatttagattgagcgttgagtgtgacaagggaaagaaaacgtggtgaatgtgggatgcggtggcagacagtaactgacattcctctggattgtttccttaaatggtttcggggatgattgccacttcagtattctctgttagatgatagagtcaggattaaataatcactgactagacactttttaaagccagtaagtaaaaattagacaaaacagtaggaagcaaagggggtggctcagtgtgttaggtgataatcctacctagcatgctcaaggccttggggcttagtccctaccaccattttggggaggaaaaaaaaaaaacacttaaatggattacttttagatttttaaaataactattagatacatccaaaattctaaatgctaattttaggttatggacctttacgtatttgtgtgtctgtgggtatgcccacaagcactttttgttcgtttgtttgtttgtttgtttttcaagacagagtttcctctatgtaataactctggttgtcctggctctttgtagaccaggctggactcgaactcacagagatccgatgcctgcctctgcctcctgagtgctgggattaaagatatgtgttaccacaccaggctcaattcacaagcttttatctttttaggaaaatgaacaagcaagaaccgactacttcatccgaacacttttacttgaatttcaaaatgtaagtaattcccattatagagtaaaaagagttcctatttccattcatcttcattcttcccatctctccccctcctccttcccattcttgctgggagtccgagtcttgctgttatgtagtttatttagtgagtgtcttgagccttatgctgatcaaactgtgtaataaagcagtctgaggttactttacttaggacaacagaattttctgtgtgtgtcttgcataattatgctttctttgttgcatagttttcttctattaacactttgcagattattgttttatttattactcacttgtactcagaattttttataaagacaaaactaaattttcatttaaagattgggatatagctcagtggtgggggcctttgtctagcaggtacataggttcaattcccagcactataagaagttaaaaagtgagctggagagatggttcagcagttaagaggactgactgttcttccaaaggtcctgagttcaaaaaccagcaaccacatggtgactcaaccatctgtaatgagatctaatgccctcttctggtgcatctgaagacagctacagtgaacttagatataataataaataaatctttttttaaaagagagagaaattaaaaagtaaatattaatttagatttaaattaaagtatcttcaggctgttgacttaaatgtttcagagtcaaaaaatgataatttttcagggaagaaaccaaagacatgtataaaaagacattggaaagatgcttgtcagcttttttctcctctattattagtctgtcttggtcactgtgttagtcaggatttctattgctctgacttaacaccatgaacaaatacaacgtggggaggaaaaggtttgctcagcttacacttctatgttgctgttgagtactgaaggaggtcaggataggaactcagactgagcagggacctggaggcaagtgctcatgagagttcatgggggaggcctgcttactggcttatttcccatggcttgctcaacctgacttattatagaaccaggaccaccaacccacagatagcatcacccaccatgagctgggctctagctattgatcactgagaaaaggccttactgctgaatctcatggaggcatttcctcaactgaggctccatcctctctgatgctagcttgtgtcaagttgacacacacaatcatccagtacagtcttgtcacagcattcttcccagctcattgtaaggctacctactttctgtctggcaagcgacacacagtctttcttctcactgactggactaatgatagccctttagttgagtcatttcttttactcaggttgcacattttatctctagttagtaccttaactcctacaagtgtatcagatatatcagttattctaactataaaagtatgtattgcatagataaaagggatttgagaagttaaataatttgcctatttagtaattgacaaatatagaacttgcatattggaactgaaacccaagctctgttctttctactgacatctagaataatcaatcttaaaagttattgaggggactaaggagactgctccaaggttaaatgcccttgcagagctcccaggttagtttctagcacagcgctgatggctagccactcacattccactcagatctaaaactctctttgaccatggggcatgaggcacacacagcatacatatgtccgtggactcataaatgaaaataaatagtttttagagttactgaggcatctttggatgtttaatttatgcgggctatcactttcaatatttactataaggttaaaattggggaaaaaatttaaagacgtggaatacatagcttacaagtttgtaaatacattcttctaattactgaatttctgcttttcttttttttaatatttatttattatttatatgtaagtacactgtaggtgtcttcagacacaccggtagagggcatcagatgtcattatggatggttgtaagctaccatgtggttgctgggatttgaactcaggacctttggaaggacagtcagtgctcttaactgctgagtcatctctccagcccctgaatttctgcttttcatgtaggaatcccgtcggctctatcagtttcattacgtgaactggccagaccatgatgttccttcgtcatttgattctattctggacatgataagcttaatgaggaaataccaagaacatgaagatgtgcctatttgtattcattgcaggtacaaaataattttctaaatgtagagaagtacagtgtttatgttttgtgagataaggttttatttctacattaatatgatgttttattatatcttgagcttttcctagccctgttatggtgtgtttgagaataagaccctgtgaattgatataatctaatctggttaatagactgtctaaatgttgctgtaaaacatcatatttcctcatatgatcagtgtcaggcaaattttcatgagtgatgaagtctcagactttaaaaactgtatatagatataaaggccttactgatctgagatcccgtggtctgcagagaagtgctgggtgtagggacacgcttataaccccaaaccaaggaggctgatgtgagctttagccgctcagggctacctcccgataatgttgtcccttagcagaaagaagggaaggaaagagaggggacagacaaagccttacctgacacatactaaacatgagagtttaaaagaattcattgctagttacacagcatagatgtcatttgtaagatatacctgaatttcatagctcttacgatgtagattgtaaggtgttttccaagtgacaaacatcctgtgctggattttgttcccgaggagcaagctgccatgtctgtaccattgttgtcataccctgaaattatagtttacaaacttctgaaatcttaagcaaacatgaaacgagcattcttttttttttttttcaccttttaaggaattatggtgggtgatatttattgttaaatattctaatctccccactttttttttttttttttttgagaattgaaggcttatcactgcatcttatgtaggccaggctggtatcagacttattaaatagccaaggctatcttccttgcctccactcttctgcttggattatagatgtgtgctatgatacctgacatagcatttttgtagtaagttaaatataaactgttggtatacatttactggacatctttattaaattgtgctgtgtagcattgcccaaagtaatgacctgccccttaacaggcttaagtttagctatatctctgttaaactgctctgtaaaatgttttcactctttccaggtaatactaagttccaattagtctttgcaaatttagtcatgttgagacataagaagtcatgtaaacacagccttcaaattctgccattcttgaaggggtaactaattttgtgttccgagtgcaggttagaggttgtgttaaataagagcaggtgtttttaactgagctcattgacctgtttttattgtctgattatttttcctacttataagccatgaaatattttaaatgaaaagcaaagaaacattccagttggaaggaagatagccttaattttttttcatatctgggaaattaagaatgtgtgcctaaacatttataggatttttatgtccttaaatattgtgacttctttgttccctgtctcatctgacagactttctactccagtaaactccgtattatttatgatagaactaacgagctctgaaacacttttcagaaaggtttgttaatgttctgtggcttctttgaatgaccactactctttttttaaaaggcggggtcttaatagccaaggtgagccttgaacttttacctccccattcctaggataccaaagaaggaagaaacaccttacctaacttagttttaatgtaaaattattcaaaggctccctaaagtggctcatgcctataatctcactgcatagcgactgtcggagcccagcctgggccgcagagtgagactatgtctcacaaagacgaagagaattaacaacaatacaatcctaaaggagcaaaccaacaaaaacccaaaaaccagggagacagcaaaggaaacaactaagctaggttttaaacacaggaaaaatagctgctacttgaattgtatgttttttctattgctgtcataaaatatcatgacccaaaataaatttaaataagaaagggttgacttagcttacagtttcagaggatgagtgtgcataatgttggggaatagcctcagcatcagaaagtaaggcaaggctaaaccctgcaagcctaccaatatttgtcctccaacaaggccccatttcctaaaggtctcatgttacaccaacctcctaaaggggaccaactggggaccaagtgttcaaatgtgtgagtctggaagacattactcatctaaaccacctcatccatgcttaaggtctacatttatagtgtatagaaaaatgttagggagaatacaacttttaaaagaataaatgttgaatcaatcataaaaatagaaggttcacagtagtttacagtataatcatggttatattgtacagtaatgtataagatatttcaaaacctaattttagaatttcactagataaatatgtatgtttccaagtagtataaaatttacttgattccttaggcagtttttctattttctatcttgatatttcaaaagaccttagaatcagagtttctcaaaaatcacactaaatttgtcctgctaaactatttgtatctgtaattgaattttactataagaaataaataaagaaaacacagcacggtagttatgcctgtaatcccagcattctggaaactgaagcaggaacattatgagtaggacaccaacatgagttcaattcccagcaaccacatggtggctcacaaccacctgtattgagatctgatgctctcttctggtgtactcatataaataaaaataaatctttaaaaaaaaaagagagattattggttaattacttttttaaaaggttgatttatttcaattttgacttttcttacctaactggtgtcttttgattagtaaagagagctgcctccaggagaattggtttgctggtagatatacagaaaccatctaacaaattactagattaaaacaatcttttcatagttaattaatggtggtcaaaaaagaaagcttttgttctgatattgaaagataaagaaatggtttaacttgattttttttaacaacttgtttgaaattatttcctgttccatcctgttattcagccaataactataattcataagtctatttcagtagggtttttctagttttaaaaattatttacagggtggtgatggtggtgcacacctttaaccccaacacttgggaggcagaggaggatggatctctgagttttgaggctagcctagatagactacagaaagagttccaggacagccagggcttgctacacagagaaaccatgtatgggggaaaaatgatgatttaatgctgttagaagacagtgtgttaactgaagtaacttaaaagcacatctacaaaaggaaagaaaacgtacccatttaatataaagtgtgtttgttgggatcttaaaacctatccccagctggctgggacctcaagtactcatgcctcagtctctgaagtgctcgtcaccataggcaggcctcccacacccagctctagagcgagcatacttcacaagaatgcttccttccatttaattaaagtcgttgtaaaaacagtgtagcttcagcgtgttctgctggagcccagcccgggtttgtcagctgcctttgtgtatggacttgggtcactaaggtcactgctgcttctctgaactgatcctacacttgaggctttctctcccatacctactacaatttactgggtcttcttgaccaaaacagtaaagccattgtgagcattctattatgcttataactattgagaataattttatctctacagggggttactggcgagaattagacttatgggggtaagggtttacaggttctttgtgaggcacttacttttataaattgctgaattacatttttaaatatcaaatattaatgttaaggatggtactgtactctaatttgtatttgatttactatgtagaattgtatcaaatttcttattggggtataattagcataccttttatttaaagaaaaaaacaacaaattttttttctcaaactttgttcccttagtgcaggctgtggacgaacaggtgctatttgtgccatagattacacgtggaacttactgaaagcaggggtaagaatgccttttatatagtatcatattcagtttattgttatgttaaatttatagtgtaggttttttggtttttggtttgttttggttttttagatatactatatttctagaattagtcttaccatataaagagcaatgtgggtaagtgtaaatgttacagctgccttgaaactatgaactgcaaaccagggtggggtttgttttccactgagtgaattctttcatgtgtagtgtttaagagtgctgaccccagggccaaagtgcctagaatcaattctgggcttgtagttcactacccatggcattttagttgtgacagttgctgtcagcattgtagtttctacctgttatttccattaaattgtgtttgaaactgtggaagacacaaggatcagagtcccttctctgaatgtgtatgtgtatgtttcttgtatatgtttcttttgctagttctatactatgttcattttctctgtgttataggcaaactttatctttcatagcttgaaatttgctatgaatatgtcagtcagcattttgttaaaaaaaaaataggttcaatgcttagttttccttttacatcatctttttccccctaccattgctgtccatctgtccaagtctcctctccctccccacccccccaaggcaagagcaagttttaaataattcttaaataatctctctgggataaaacttcatttttatattcccctaagactaatctttttctaatatgaaacgtttttcaatgaaaaaaattgactagactgcgctcttcccagttgtttatgtttggttggttggttggggttctttgcggggaagggggatgaaacacagggtctcactatttggttctggcttcagagacagacagacagacagaggcagagagaccaggctgaccttgaactcagagatcctcctgcttctgcctcccaagtttttggattaaaggaatgtgacactgtgcctgtatctcatttgtaacataaaagtaagaaattacaggactagattgatgacctagcagtaaagagcacttcctgctcttgcctgggaccagaggtcagttccagcacccacaccatgacacatcctgaaacataactttcaggatagccaaggccttctgacctctgcaggcaagcatctggtgcacatacatacttatatatgtagataaaacacatagaaatatatatgtacttgggagaggatagtgcttagacagggcttcactgtagctttgactgttgtaaaattctgtagaccaggctggcttcgaactcacagattcacctggctctgcctcccacgtgctgggattaaaggcgtgccgcaccacctcacagcataaatgaatatttttaaactccaaaactaaaactggaaaaggaagagatagaaaagggagagatattaaaatactagcaaacaaaatttgggaaaaagtttcagaatattttaagtatttgtttgaaacatcactaaagttgtttattatagtccccacttgattgaatttatcttaacataactataaacctagagcttagctggaactggatataaaaatgctttttagccgggcgtggtggcgcatgcctttaatcccagcattcaggaggcagaggcaggtggatttctgagtttgaggccagccttttctacagagtgagttccaggacagccagagctatacagagaaaccctgcctcgaaaaaccaaaaaataaaaaaataaattaaaaaaaatgcttttaatgtctctcgagactacagcttaaaatcattctttgcttgtcagtcttcctcatggctccagaatgtttctctcagacaaccaaatcctactcacttcttcctggttcagactgccgtctttcctggagtagagttgggaggtacagacatacctcagtgtggactggatacgctgtgcgtgtgtctttacagagacgagcctgcgggtctgccttagctctttcacttgtgtcgtgcatggccgtggccaaggacacagaggcctagaaagtaaagtcaaattctttatcttaggctttatccatattcaacgtcttagttctccgagtaatcagtttcccatgattttgtcagaataaccttttattcacacttatgtgttcatgtgcgtgtcagtatggtgtgtgtatgtgttcatctgtgcactggtatatgcaccagcaagtggtggtcagaggttgactttctggctcttttacaccatagtttctgtgttaatgtctcttggtaaactagcactggggtttcaggccccagcgccacaccagcatttatgtcagttctgtggaactgcagccaggtcctcatacttatttacatgagcacttccctgacttgagccgtctttctcaccccttcagaactgtgtaatttttcccccacctatcagttttttgtggtctctgtgtttcctgcatgggctagtcacattctgctgcgtgattctgaggaccggatacgtgcatctgcagcactgtctgtctttgtctgatagctagagcgcagtaaatacttgcagttatccagcctgtatctaaggtctgtgtgaaaacttggagggtattttactattttctgataatgttatattctttgttttagaaaattccagaggaatttaatgtatttaatttaatacaagaaatgagaacacagaggcactcggcagtacaaacaaaggtagagttggtttttctctttgtaagttatatttttgtaagtgtttctccttggatgctcctcactgtctcgtactttatcatttctctttataataggagcagtatgaacttgttcatagggctattgctcaactgtttgaaaaacagctacaactgtatgaaattcatggagcacagaagatcgctgatggtgtaagtgttcttggctcactagccttggcagacttgcgatcttgtgctgtaggtgggtgaggtggtctgaaaaaggagtttcggtttggggtttttggggaggtggagctgggggttcaagacagggtttctctgtatagccttgactatcctggaactcaactctgaagacaaggctgatcttgaattgagagatccccacctctgcctcccaagcgctgggattaggcgtatgcaatgactgcctggctcacaggagttaacttttatctgatgtgggtcactaactcactttactttttatcagttacggtccagagttagtgattcaaactgaataagtaaaatttaaaaggatcttatgtcaaagtctacattcactattgtttcaagtacaaactacctttaaaaacttaactgcgttactgctctcacccttaactacgtaattgtacgttgagtttaactgaaatttattttggcgtggcagtataacattttgtaggtttttgcatgtactccattgcttgtttgtattgtaagacaatcttgctatgtagtcccggctgttggaggttctcttgcctcggcctccttgagtactgggatgtaatatatatacatgctctttaagaacagtcataggggactggagagatggctcagtggttaagagcactgactgctcttctgaaggtcctgagttcaaatcccagcaaccacatggtggctcacaaccatccgtaacaagatctgatgccctcttctggagtgtctgaagacagctacagtgtacttacatataataaataaatctttaaaaaaaaatagtcatagggccaccagaaagtccctttttgtcatgctgtaactccttgctatattagccttaaatgatcttactggagctgcagattgtttagtttattattaagggctgtgtatttgtgtgtatacaacatgatgtggggtgagggatacataccacaatgtggagatcatgtgtcaatcaaggaaaattacttttcctgtaattttagtaaaacttttttttccccttggcagaatgaaattaccactggaactatggtcagttccattgatagcgagaagcaagactctcctccgccaaagccaccgcggactcgaaggtactctgtgccttagggaatctcctctagaaggatgcttactctactgacctaactaaaatgacaacatcggattttttcttagtttcataactagttatttttttaagatgtaggacatttgccaattatttgttattgataagctaaggtttttgattgatttttatatataatatcaatactacactatactaagatacatattttggtgttagaatacgaaatatccccttagctgcctttaaaatgggctaggaggactctctagaaccaggaagtcagagaacagtcaatgtttggagacactgcccagatcctctcctgaccaaattctactgaaggctcatttgttctatgtatggcaggcacaaagggaagaagcgagactggaaagcagtgttgtagaggcttaaaggagaaaggattttattttgtttgtctaaagtttggtttgacagtgctagtgtctcctgcatgtgagacaagaattctcctctccccacctccggccccaggccacatgcccagccctgagggagggcaagcatagcgcatgagtgagtgtagtgagtgtgtgtgtgtgctcccaacagcatctgcctgagatgaaaccgcattcacacctgggtgcaacacagagcatttaagacattaagattacaattacaattaagagattctagcgaggagttatggatagttcatgccaaaccatttagaactgtctaacgtgggaagcctacaaacagtagtgtttgggaaaattcacttaggaatgaaaaacaacaagtacaaattaagatgacgctggatgtcaaatgagcattgaagaaactgaggcagttttggggattgctgcaagctataacctgggctacgtggtaggtttttaattatggtttagatttactcatttgaccttatgtgtgctttatctgcatgtatgcatatgcagataaatctctgtgtgtgtatgtaagaaagtggcatcagatcccttagaactggagtaatgggtcgttgtaagcagttgtgggtgctgggaatcaaaccctggtcctctggaaaaggatgctgagccatctcaccagcctcaagtttaactttttaaaagacaattgtatcaaattcaaataagctgtgttaaagaggtttatttataaagtagtagacagtagaaaatagaattttaaatagaggtttattattttagttagttttaaaaaaataaataaggggctagagagatggctcagtggtcaagagcactcactgctcttccagaggtcctgagttcaattcccagcaaccacatggtggctcacaaccatctgtaacgggatctgatgccctcttctgttatgtctgaagacagcaacagtgtacttataaaataaataaatcttttatataaataaataaggctggagagatggctcagtggttaagagcactgactgctcttccaaaggtcctgagttcaaatcccagcaaccacatggtggctcacaaccatctgtaatgagatctgatgccctcttctggtgtgtctgaagatagctatggtgtacttacatataataataaataaatctttaaaaaaaaaaaaagccgggcggtggtggcggatttctgagtttgaggccagcctggtctacagagtgagtcccaggatagccagggctatacagagaaaccctgtctcgaaaaaaaagcgatagatagatagatagattttcttggttgataaattatgtatgtaatttagcttttaaataatatttaaggtactttttttaatttgccagttttcaaaacaccagagtatgtgtttttaaaactgacagtatgttaaagtgcatctagattcatcaaagccaaaactatcaaagagcaactggaggaaaatgagcagaggactagcctgtttaaagattacagcctttcagagcaaacgtgcagcctggctcccgaatgggaaaggcagaaagaccagaaactcaaggtcaggcctgtcagatggctcagtatagtcactcagtgtcaagggaatctgatgacctgagttcaaagccgggtgtctgtcttctgcctgccagtgtggtccatacatagctgcacatccacatcgaactcacagataacgaggaaaacttaactcattgccatcctcaactacatacagcctggtcttcacaaggctgcatttaattagataaatataacagtttatttccactagttacaaaaacaaataccagggctggacagggagatagcatcagaaaggtaaaataggagataattccagagtaggtgcctctgcttcatagactagaggtggagactattgcttttcgttagtatcgtaggactttaacaatacctctatgttaccttgataaatacagaatttccttagcttacgaattagaacattgtaagtatattgtaatcagtcaacttacttttaaatgttaagcattgttaaagccctatctgtcctcctcagttgccttgtagaaggggatgccaaggaagaaatactacagccaccagaacctcacccggtgccacccatcctgacgccatcacctccttcagccttcccaaccgttaccactgtgtggcaggacagtgacaggtaccacccaaagccagtgctgcacatggcctcaccagagcaacacccagccgacctcaacagaagctatgataaatcagcggacccaatggggaaaagtgaatcagctattgagcacatagataagaagttagagcgcaatttaagttttgagattaagaaagtccctctccaagaagggcccaaaagttttgatgggaacacactcttgaataggggacatgcgattaaaattaaatctgcttcatcttctgtagttgacagaacctctaaaccacaggagttaagtgcaggtgccctaaaggttgatgatgtatctcagaattcttgcgcggactgtagtgcggctcattcacacagagctgctgagtcgtcagaggagtcccagagcaactcacacacacctccacggccagactgcttgcctctcgataagaaaggacacgtaacgtggtcacttcatggacctgaaaatgccacacctgtacccgactcacctgacggcaaatccccagataatcattctcagactctgaaaaccgtgagttccacacccaactccaccgcagaagaggaagcccacgatcttacagagcaccacaacagctcccctctgttgaaagctcccctcagctttaccaaccctcttcactctgacgactcggactcagacggagggagctctgatggtgctgtgaccaggaacaaaactagcatttcaacagcaagtgccacagtgtctcctgccagtagtgctgagagtgcttgcactaggagagtattgccgatgtccattgccagacaggaagtagcaggcacgccgcattcaggtgctgagaaaggtaatacagtgtctggcacttagctcgttatctgcctgcctctgttctaagcatttagctcggtcagttcactatcactccacaccacacttgaacctgcaacaaaagttagttggtttttagataactttttgtttatttgtgctttggttttttggagatagggtttctctgggtatccctagatgtcctggaactcactcttttagaccaggctggcctccaaatcccagagatccaccagcctctgcctcctcagtgctgggattatcaacacgtgcaccactacacctggccaaataccatttttctttttaaatattctaattcagagtcttttcctctctccacctagtgtaaatgcctataatgagcaggattgttttatagaagtatacaaccttatttaacatctctgcatttacattactatgtttttattctactcttacactacatccaatcacaggttcccctctctcctgtcttccctcccccccagatcttcacccctccccagcaaaagagcaggccactcagggttatcaacctacaagctgcaataagactaggcacgtaccctcgcattaaggctggacacggaagaaaggggtaccaccaaaaacaacagcaacaacaacaattcagggccagtcccctgcccttacattttaattataagtttatatttattgttaccgtaatttgatctttgtgtcaatggaattagtgatacaaatactatagaacccttgcttagccatttaatttcacctgtgcttcttgtaaatacttaatagtcctattttcctaccaatgactacaaaataactttttaaagagctcttttcataaatgcttacaaataaagttactttgagctggcaagttaagccataactactcagctaactagagtcagttttattcattcaaagctgagcagggtgtctatataccctgctaccaggtttgctccttaatcctaagcagatgccaagtccagaggacacgtgtactcactcacactgtaggattttgagagtgggtttcctatgtatttcagacgggcctggaactcgggatcctcctggctcctttgccctgggattctagtttgatgcaccatgcctgccatagagcatttggttcttgaaatcttcgtggcgcctttcctcttgctttgttttagagacaagggcctgcagcttcatctttctggctcaatcccctatactctgagatacccaggaatgtactaccattgactgtcacagtatttttcagggatagagtgatggctcaattatcaagagcactgggcctcttctagaggactctggttcacttcccagcacccatgtggcagctcacagctgtctatataactccagttccaggggatctatcactctcacacagatatgcatgcaggcaaaacaccaatgtgcataaaataaaaataaataagtaaacaagtagacatatttttattgttcctaattacttaccttgtagattatatcatgtactgtttgttttataattgattatttaatttgttacttgctttgtaaaacaatggcataaaaatattaggaaattttgtattagaatttgttagtgaggctggagagatggctcagtggttaagagcactgactgcttccagcggtcctgagttcaattcccagcaactatatggtgattcacaaccatctgtaatgggatctactgccctcttctggtgtgtctgaaacatagtgtgctcacaaacataaaattaaaaaaaaaaattgttagtgaattaaccctaatatttttattgatagcaaaaaaatattttatataagttatttattgcctgaaatttcattattttctcaggcctgaaatttcattcagatttgacccaagtaggccccacacactgtgtaatgttgagaagcctttgtaaaacatggcagtctctagttgaacaagtcttgggttgggggaggggctactgggagttgacttgagtctcttacatgctctagcctagaactctaactccagtcatgatatgtaaggtctacagaaagcctgaaaggccatttatagatccaaggagaagcatgcagttgagaagcaaggaccagttagaaaacagacaagtgattgtcaagaaagaacctggtaaatacttagcagtgtgcagaacttagtcccagtgttgtgtgtccttccttgaaataatggtttcttactgtggcactttctcagtgccactctaggtaaatctatcaagtattgtattggaactgtggactgaaggctgtactttgtgtgatgtcaccagctctataaacatgagggacacggacagtccgccaacctcaatgcttgttgaaaatgtacttaatattgagcttttagtactatcaaatatggtaaaaagataatgtcctgccagaccactcattttcaaagaaaataaggataaagcctggacagactagtataggttcatcagtatagttcccatatctatcctgcctagactgggtatacacgataatagctctagtatggtctcagggtttggtttggtttgtttgtttgttttttctctttctctccctagagcaggaattcagagatccaatacactggtttaccctgagttgtaaggctaaccttaattaatgcattacctcctatcttttctaggggctagataggtttctactgctgtaaaagcctttaaaatgacttcagtttatatccttgacacggtcaggtgatagtgttcacagtacttggcagtaaatatatggttattaagatattagtagctgtattatatctaatagataacgtgacttaaaatgttactgtagttgcttgagatgtgaccaagtacatatttttccatgagtgaacagatggatggtgcactgtggttccatgttttgccccgctgctagggtgtggaagtgccacaggacagactaaacactgagacagtagactgcacttaccctgtgcccactgtcagtagcactgatacaccactcagggtgcgaaaatgcagcctacgatgtagggagcttaaactggggtcccctgattccttggtgtccaatcaccactggaaaccacagaggagtcagagacggtgggtcaggggtccacaagcctgcaatgagccagtttctcagactcatggacatccagatgccagtggaagtctcagaagagccaagaatggaggtggcccataggctgtggctctgtaggtgaaggccttctccatgctccccgtggcagttcttgatggaagagactgtccttggttctaaagtgtttattgattggtcatcatagaaaatgtgtgcataacaactccttgaggtgaaccagagattaaataccttttgcaggaaggaatgtccagaggggaagcttattggctaaaccctcaggactcctctagatacctcattagcatggaactctgttctgaccaccggtcacgtttcctctgtggaaagagtggcacatgttccagcccagaaatctggtagggagcgggaggcgcctaccgtctcagggaggagcctgggtgctggggactgcacctgctcagccttaccaagttccctgcacatgaaagtcatgctgtcagtcatgagggaacactggctttcaccaggtgagcagattgctgctctgcacacagagcatcctcagggacagcaagcctccgcgcaatcagagtaatgtctccgggtcccacagacctgtaggaggcgttcgctttgtacatatatgtacagacctgtaggaggcgtccgctttgtacatatatgtacagacctgtaggaggtgtctgctttgtacatatatgtacagacctgtaggaggtgtccgctttgtacatatatgtacagacctgtaggaggtgtccgctttgtacatatatgtacagacctgtaggaggtgtccgctttgtacatatatgtacagacctgtaggaggtgtccgctttgtacatatatgtacagacctgtaggaggtgtccgctttgtacatatatgtacagacctgtaggaggtgtccgctttgtacatatatgtacagacctgtaggaggtgtccgctttgtacatatatggagtctgttccatctttgctccgtgagatgctttactcgtctccattgtgaattgagcggtaacgatgttttcagtgttggacggttggggtttgttttttgtttttgtttttttcaagacagggtttctctgtgtagccctggctgtcctggaactcactttgcagaccaggttggcctggaactcagaaatccgcctgcctctgcctcccgagtgctgggattaaaggcgtggtttatttttttaagacatcaaggaagttagttctccgtttaggtggtattttactaattttaattgtctgaattttgtgtgtttaattcagatgctgatgttagtgaggagtcgcctcctcctttacctgaacgaactcctgagtcttttgtattagcaggtgagcgtaatgagtatttcttccatattgctgggtttatttaatttgccaactattatactgagtaattaaaatcaaaatgtaagttgtaattgatgctgacagtttttattactcacttgaaagctctttaagtagtatttttccatacctaaagttgctaagtgactatatttgtggtagtcattggaaactactagaatgaagaaggcaaatgcaatttcaaatgtattcacagcgagcgcagttgctgtttcattcactaatccagacaacttctgctgcttcactttctagtgaatgtaagttaacattcaacttgagttgtgaatgggcatgtttatgaagatagtttctaaaatttataggatttttttctaatgactttaataaaaaaaatcaaggattaaagacagaagtttcaatattgagatttcttttcttgttccccagatatgcctgtaagacctgagtggcatgaacttccaaatcaggagtggtctgaacaaagggaatctgaagtgagtcgtgtggggactggaatagctctacgttagctccaccttagagctgttatcctcagttaccagcttcctccattcctgcacttgaccatttttcattagtgtttttacaggtgtttgtttgtttgtttgttactttttgagacagggtcccccatagtcagactgtcctcaacttgtgcccaggcctgcccttgaaccattgaccctccctctacagtctcagttcaaggatatatattacacatatgcactactacatcaggctgtatactcagattaaaagttgatataaaatgtgtaagatacactatattttcataaggccatctcttccaactgttattccgttagactgcttttgaaaaatgcataaactagaccatgttttaaatcattttggaggtatgaataggacttagtattgagggagtaaaccactataactagattttgtggccctatcacaaccaccctaggtttattttatattcaaggaaaagtacatagtggtaacttggactcagaaacaccacaattggataaaatatagtagattactatattttgtgttcctccatgcattagctaggtgggggtgctggttttgtttttatgcagaagtttcccttcacagtatatacatcaggatactaagctgcagagatgggttagtggctaagagcaatcgctcttcaagcatgagggagggcctaggtgtgccccagcccccagggctgcacagcggtagagacaggataagcactgatccagattcactgagagactcaaaggaataaagcagagagtggtagactaggatgccggatgtcatcctctcagctttacacacacacacacacacacacacacacacacacacacacacacacacacgcacacacgcacacacacatgcacacatacgcacacacaagtgggaaaaactttaagtaaagcataacaaaattgcaagcataatgatacaccattgctttctttttctttgatattgaatcaagacacaaatcaagcatggcgtgcatgcctttaatcctagcacttggggagatgggagaaagaatggcaggaatttgagtccacccttggctacatattgagtttgaagctagcctgggctatatgggattctgtttcaaaaattaaaggactttttttatacaccttaatttcttggggtagatccctataattgattaagtgttatatttattgcacataagatgaactttctgtaataaatataaaatgtctttgcagggcttgacaacctctggaaatgaaaaacatggtgagttatttgtcctttttaccagaaactttacagattaatttatttaaaatagcacataccttgcttcatgctctttggttattcctgtatatgaaggtctctaggataactgcttgagaaaacacagttctgtgacataattcttctaagctgactcactcatagatactgttgatctgagttggaaagtcatgggaacattcactatcagaagttatgagtttatgtgttgcttcttggatagttgttgcatttcttatttattaaaacatctagacgttatgggtatagctgtgattgagcacatagttaacaggcctaaagtctaggtttactctctagcacaaaaattaacaacaattacttagcagttcatttctgtgagagtgaatgccgcagactgaccaacaagaaggaaatgtgcccatgactgttgagggcgtttgtgttcaatcagtagttaatactataagttagaagttctgtgtttgatggaggatatctcagtgagtgtctagcattcgaaagtcctgagttcccagcccttcagacatcaggcattcctgcagtcccagaactcacttgcagggagcggaaggatcggaaggtcaaggccatacaaacctgtctcagactggaggtggggaaggagtgcttgaaggattcactatcctcaaatggaacaagttactaatgacactgctgtcactgttcccactcttactcttctgaaacatgtacagtagggctcttggtgccctgctccttccctatgctccaggtagcaccatctcctgtaccctctgcctttctgaaccttgacttctaaagctgagtcctgttcctagctgaccttcacttgactaagattgacattttagatctgcgtcctcttttgtcttagaaggtggccctgagaacctcgctacctctcgttatctctcctgttcccatcatatctgcctgtaatcttatcatgaagttcaccacactactaagatgacttgtgcatgtctcttactaggccagcaactggaaggctataacccccaggtcctgtcctgctcttggcaggactttgtggacctttgagctgaatttgtttgttcattttagaaaattgttttatggctggtgagatggctccctgggtaaaggcaccctctgccaaggctgacagcctgtgtttaatctctaggatccacgtagtaggagttacccactcctgaaagttgtcctctggcctctacacgcgtgctgtggcacctgcattaccataagtaataaatgtatatggtttaaaaggaaaccaagtagggagggcctgatgatgatgatgcctgaaattctagcacttaggaagcaggcagagggtttagaagttaaaagccaacctgggctacatagcaagactgttttagcaaaatggaaagaaaacaaagaaaaatggaattgggattggaggggtaggcaaagagtaacacaacagaccttaaggacagggaacacctttggacttatctgggtttccagaaaggtttttccctgaagttgaaggagaatgacacaaactacaaaggatgctgggtgcgctgcttatctgtaatctgaacactctgaaggcagaggcagatgaatctccgaatctgaggccagcctggtttacttagcatgttccctctcaatgggagaaggaggaagagagaaaagagggaaggaaaagttgtagaagaattagtcttcattttttttaatataatcttttcactgctctttaaattagtaaaataacaacaatttaaacaagaagacttcaaaaaaattagtattggcctggggagtaggaaattgaaattgcccagcaattagaaacctgtttaaccactctaaccactttaagaaaatatagcatgccatgtttagggttgatgaaatgaggtaagtacacaagaacattcccattaccgacctgtagactgcctgactgaagctgggcttctgatcttagcccacaggagagctggaactttagaccagcctgagctatgcaatgagactgtctcgaaacaccaccaccacacacacagagacacatagacacacacacacacacaccccacacacacaccctcgtcaccccgctccttgtatttatcatggaatctctaggaaagacaaccataaggtgaaacttgctcttttattctatatgttcctccagcaaagtggtgtgagtgtgatgctgccttaacgatggtgactaatgaggacttttatcttagatgcagggggcatccacacagaggcttctgcagactctccacctgctttcagtgacaagaaagatcaaataacaaaaagtccagcagaagtcacagatattggtaacttacttcataattctaaaagccaggcataatggctctctttcaatgcttctatctgtcctttcccatctctttggattaaagttggatagaaatatattttgttagatattagaatggctatgcaagcttgcttcttaggtccatttgtttggaatatctttttctaactctttactctgaggtaatgtctatgcttgatattagggtatgtttcttgtatgcagcatacatacattctgttagactgtgtctttttttttccttttagtttttcaagacagggtttctctgtgtagtcctggctgtcctggaactcactctgtagaccaggctggcctcagaaatccacctgcctctgcctcccaagtgctgggatttaaggcgtgcgccaccaccacccggcttagactgtgtctttttattaaggaattaagaccattgatattgagagatgctgatgaccaatgattgttaattcctattgttttggtggtggtggtgggtgtagatgttccttttggatttgctcgtctgaggttatttatttcctgtgttttcatgggtttagttaagttccttgggttcagtattccttctgaaaccttctgtggggctgaatttgtagatagatattatttaaatttgatcatgaaatgtctcatttactccttctatggtgattgaaagttttgctgggtcaagtagtctatgctgtcatctcttagagatgtagtctcttagagcctgtgagacatctcagatgtgattctgataggtctgcctttgtatgctgtgtggtctttttcccttcctgcattttcccctaagacagggtttctctgtgaagcgtggctgtcctggaatttactctgtagatcgttctgcttctgccttgggggctgggactaaaggtgtggctgggatcaactacctgacttcccttgcagcttttaataatccttctttgttctgtatgtttagtgttttgtttattagtagtgaggggatcttctcttctggtccaatctatttggtgttctgtgtgcttatacaattataggcatattcttctttagttaggaaaactttataattttgttgaatttcttttttatcaatttgtgttttctttattgcttctattttcatttttaggtcttgaattgttttattagttttcttcatctgtttgtttgtttgccccccacatacacccttggtttctttccatccaatttttgtttgcgtttttctgattttcttcgatggaattattaatttcttctttagggacctctatcatcttcatatacttgttattaaggtctttgtgtatgtgtctgtgtgtgtgagtggaaaggaggctgcagctggtgttctgttgcagtggtaggggtgaccctgataattgggtttgggggaacagctatagatgtattcttaaaaaaatacctttttaaagtccttttgaatgttaatttgttattttggtttctttggcaataggttttggtaatcgctgtggaaaacctaaaggaccaagagagccaccttcagaatggacatgatgcagggagtgaaaggacacttcacattatactggaacactcaagtgccactgaaagccaggcttatagtattccatctttaaatgtgggactgatagcagtgtagattgttaccttaatgtttttgctgggaccatctacctgccttatactacacttaggaaaaagtattatattgtttattttgtaacttcaagtattattgccttaatgtctcttaaccctgttacaagctgcttgtagacctgttaatatagtaatacttttatgataaattgagttaaaggactactcttttgctgttttatcatgtatgcattattttgtatatgtacagggcaagtaggtatataatttgataaagtcctaaaatattattaacagaagatgtaagaatttctgcatggtctaagtctttgtgtatcttacttgtaaattatttgccctgaagttttagaaaacagtttctgaattttaaacttgctggattcatgcagccagcattgcaggttatcagagatcaaagattgtaataataatacattttgtaaattgtaagcaaaaagttatttttatactatatactgtctaattgttcatcctaatggttcttgttttcatctagtcatggagattcagtaagtgccttggaacaatattgaattctcttagctcgtgtgtgttactttaaaatttgaattcaactggggttagaagactatcagaatatatgtatgtttcaggatatttgacctgccattaaaaaaacaaacagttttacactgctacatattgtattgtttttttttaactctgaaaaaaagatttgtattaacaaagtatatttgtgcatctgtggtgttctatgcatgagagtgctgggtcctccgggagctgaattacgggagcttgtgtgtgagctgtccagcgtggcttcggtcctctagaagggtggtgcgaactttaaccacctctccagcccagtggggtttaatcacttacttgtggacaaggacggaaggcttagacctgtgggcgggtacatggaggactgtggtaggaagaccatttgctcacttaaacctgtaaggtgaagtttgcgcagcataacaagatttagtctatgagagggtaaaaatgagactagaaagtactctctgaggaaatcgtgtctgtgcccattctcagcacctgtcagtgttactcttcccagatcccagaagagcagcacacaagtgaggctgtgttccctcccatccacgctcagggattggggcagacattatgttttccctgtgcttacagggacgcacgcctttaatcccagcactcgggaggcagaggcaggcggatttctgagttcaaggccagcctggtctacaaagtgagttccaggacagccagggctatacagagaaacccggtctcgaaaaaaacaaaaaaaaaaaaagcatggcgaaaccctgagactgaagggagctggagtaacttaatgaggttgttgttatcacttaccgtttctgtgttagttttgtttttgagttttgggccaggatctcttgtattccagactgggttcagctttgttatgtagccaaattgtgccttgatttgctactgatcctcttgtctcagcctcccaagtgctgggattatgagatgtgctcttgggtttatgttagcattttaaaaacaaatgattttcatgttgattccttagaatatgaaaagtttttcatgtattttcatcattagaaaacagtagtctaaccaaccaaggagtgtacctggagggtccatggctccagatacatacatagcagaggatggccttgtctgacagcaatgggaagggaggcctttggtcccagggaggtttgatgccccagcatagggggatgctggggctgtggggtgggagagtgtgggtgggtaggggagccccctcatagaggtaaaggggaggggggagggcagatgggggttggcgaaggggtaaccaggaagtgggatatcatttgagatgtaaacgaatggaatgataacttaaaaaaagaagccgggcgtggaatcccagcacttgggaggcagaggcaggcggatttctgagttcgaggtcagcctggtctacagagtgagttccaggacagccagggctacacagagaaaccctgtctcaaaaaacaaaaacaaaaaaagaaaatggtggtctagtagattcttgacaattacaagacacaaatatcttaggctgtcttttgtatgaataagactaattttttttcattgtgacaagttctgtgttttatagatgtgccaatgtgatttggcttttggaaatagtacagactatagtgttgaatccttttgtttgtgtcttttgcaacgtatatatacatatatattgtatataaattatagagtggaaatttcagaggatagaatgtatactgagtgactgttctgttgctgtgaagagaccatgacaaggcagctcttttttttttttaatatttatttatttattatatgtaagtacactgtagctgtcttcagacactccagaagagggcatcagatttcgtcacagatggttgtgagccaccatgtggttgctgggatttgaactcaagaccttaggaagagcagtcgacactcttttttttttttttaaagattttctttatttctttagttaatgtatgtacattgtagctgtcttcagacactccagaagagggcatcagatttttttgttacggatggttgtgagccaccatatggttgccgggatttgaactcaggacctttggaagagcagtcagtactcttaaccgctgagccatctcaccagccccgcagtcgacactcttatcctgagccatctcaccagcccaaggcaactcttctgaaagaaagcatttaacttgctttctggtcaagcctgattttgaacgtcttatcctcttttgtctcccaagtgcagggattccaggcaggcacatcaacaggcgtatgcagtgcttcgaatagaacccagggcttcaagtgtgccaagcatgcactctgcctgctgagctacctcctctcaccaagccttctatttttaaacttgacatgtgatttaaagtcctggcaaaggacattcctggctcagtgtttaagagcactgtcagttcttccagaggacccagattcagttcccagcacctgaaacatggcaaataactaactccagttcaaggaaatctgacacccttcacatgtcctctgtgggtactgcacacatgtgcacagacatacacacaggcaaatactcgtgcacatacaaataaacagttcattcttgggggaaatcttaatatatatatgttatctgttgctgtccaggaatcaccacgctgcagtctcatttaagcaagcatagtttactgaatgcacaccccaagactgattgatactgatgcagctaaagactcaggagctaagactacaaccctaaatgtcttccagggcaaaaaacacaatcagctcatgtacagcaacccagtggtcagctttgactcaagctgctttggctgccttgacaaaacagttccaactgacctttattctgattggtcctaagaggatcttatggttgtggagtgtctttaaaaaaaaaaaattcagaacataacagtatgtgtttaacttgactctgttctgagtcaagctatttccctgtgtcagcaataatataaatggctgaaacaaaatggctacagttatgtcagggaagcagacttcaacattgtccatttagtgtattgtgcctgttcctgaaaccagctcataagaatgatcaaaaataccagcagtaaggctggagaggtggctcagcagtaacaagcagtggcagctttttcagaggaccagagttcaattcccagcatccatatggcagctcacagctgtaatccagcgccaagtgatttgacaccctcacacagacatacatgggggcaaaacaccagtgcacatgaaaaataaaaatagataaataattttttttttaaataccagcaataggggcaggaacaatgacttagtggttagcagcactgccgctcttccagaggacctgggctcaatcctcaacacacacaatgacttacaactctgtgtatctccagtttcatgggctctgatactctgccctcccaggacactgcatgcattatagggtacagacatgcacgtcagcaaaacaccatacacacaaaatagtaaattaaaaaaaaaaaaataccagcatgtatcctgagtactttgttagtgttttcccaaatttcatatttgacttctctgaaagcatgtagccatggatttagaatatactaagtagagcagggttggggggtgttgacacatactcttaatcccaaccctgggcagactcacaggtgagcctctgtgagttcaaggccagcttgatctacagagcaagttctaagacagccaggactggaaaccctgtcttggaggggggaaaaaaattaaaacaacaaacaaaactccaaaaagtacagagaatgttctaactgaatatggcacctgccacacttgtcgtctcagcctgccggcgactgagccaactagaagcatcatagtttcaaagctagcatgggctgcacatactaagaccctgcttcaaaacaaaaccaacaaatgtaacgatgttccatagctcagaaagacaggctttatgtttatcatgaagggaaatggtaaaaagcattaatgcatcttgcaatcagagatctgaagttggttttgtttgagaattgggtcatacatgtgcagggcagacaggctttagctctcagcttcccaagacaacacacacacagaacaaccatgctcagaacaaccatgtttagaggaatttcactgtaaaataacatctgaattacatttgacaaattattgcccaattgtaacattttgttgaaatacatatttggtgcttgaaattcatatttggtgcttggcctctgaagttattttggattaatgctaaatataagattaaattagctgggcgtggtggtgcacgcccttaatgccagcactcgggaggcagaggcaggtggatttctgagttcgaggccagcctggtctattgagtgagtgtcaagacagccaaggctacacagcgaaaccctgtttcggaaaaccaaaataaaatagaataaaataaaaagattaaattaaattagctcactgtgttggttttaataactactttgcaaagatttattttactttatgagtgttttacctgcacgtatgtctgtgcagcatgtgagtgcatgcctggcacctacacaggtaagtagacataggatctcctgaaattggtgttacggatggttttgaactatcatgtgggtgctgggaacctaacctgagtcctctgcaggaaagcaagtgctcttaaccaatgaaccatctctctagtccccgtgtctccatttttcatttagtatgtgcttttctgttggggtttcattatgatattttcatcagcatagacatatacaagccaattcaatcattaatgttcattcccctcctgtcttcctgtcctttgtcttgctgtccttcctcaaataattcccctttcctttcatgtcttttttaaaatctatatgctacatatagagaaaatgtgagtggtttcccagatgttttctctggttctatccattttcccacacatgattaagtttctttctctatccacattttgtgtgttattgctgagaacctaggctggaccataagttggttctcgtgaatgatgctgtggtaaatcccggtgtgcagacagttgcacactgcttcttgcaggtgtataccaacgtagtcaacaggatcttgctggagttctattctcatgaaattctatactggcttctataatgaataaactaatttacatgcccactaacagcctgtaatggtctgtcttagggtttctattgctgtgaagagatgccaagatcacagaaactctttttttttttttttttttttttttttttttttttatgagtacaccatagccgtcttcagacacaccagaagagggcatcagatcccattatagatggttgtgagccaccttgtagttgctaggaattgaactcaagacctctggaagagcagtccgtgctcttaaccgatgctccgtctctccagcccacagaaactcttggaaaagacaacatttagtttgggctggcttacagttcagaggttcaatttatttccgtgccaagaaacaaggcagcatgcaggcagacatggtgctggagatgtagatgagagctctggatctgggttggcgggcagcaagaagagtgacactgggtctggcttgagcttctaaagccccaaagctcagccccagtgacacccttctccagtactgccacatctactccatcaagaccaaacctcctaaccctgtctgtcacctagtgccactccctaatgaccaagcattcaaatgtatgagacaatggaggtgatttctagtcaaaccagcacagggccttttcccttgtacacattctcatctccagcattgctgtctcatatatctcagtggtagtcattctaactgtcaatgacattaaggtgtaaccttaatgaggtgttgatttgaatatcctagagatgctgggactcttctgtgtttacttttcttttgagaaatagcttgatccatttatttgttcacttagattgtttattctttggttgtttaatctttcttaaagttccttatgtactctgtagagtttcagatcttacattgaaggtctttgaaacacttgagatgatttttatagggtaaaaaacagggatattatcccattcctctccatggagtgttccctgcatttaagagactgtcttctccattgtatgttttggcactatttcaaatggggtttggtttggtttgggtttgggtttcttgttttgttttgtttgtttttcttttttgtcagcttgacacaagctttaagtcatctgagaagagagaacttcggtagagaaaatgctgcattggattgacctgtagggaagtcttaggagcatttctttcattgatggttgatatggagagcccagcttgctggaggtggtgccactcctggacaagtggacctgggttctataagaaagcaaatggagcaagccagtaagcagcactcctctgtggcctctgcctcagttcctgccctcaggctcctacccttcctgagttcctgctttgtttccctcagtggaccgtgactcaggaactgtctttatcaaggtagcagacagcaaaccagaacctttggggatgcctttgtcagatggctgtggctacatgagtctatttctggtcccatgtccttcccaactggtcagtttacttgcttatttattagttggagtctgttcctttggtgtttccatgcagtgccatgtaccatgctgttttataatttgggctttatagtataatttggaatacagcatctttcttttctacgcagggtcttttgtgcttccatgtggattttataattaatttttcctgtttctatgaagaatggcattggaatttgatagggtttgcagtcaaatctgcagattgcttttaattgtcacagtactaattctgcatggtatgtctccatgagctcaggacatcttcccatcgtaggcttcttgcttccatcactttatggtctcatggcagagccttgctcctccttagctaggtttatttctaggggttttatttgtttgtttctttctttggttggctgcttgcttgctttttatgaatgcagtggtgtggtgtggtgtgtgtgtgtgtgtgtgtgtgtgtgtgtgtatgtgtgtgtatgtgtgtgtgtgtgtgnnnnnnnnnnnnnnnnnnnnnnnnnnnnnnnnnnnnnnnnnnnnnnnnnnnnnnnnnnnnnnnnnnnnnnnnnnnnnnnnnnnnnnnnnnnnnnnnnnnnnnnnnnnnnnnnnnnnnnnnnnnnnnnnnnnnnnnnnnnnnnnnnnnnnnnnnnnnnnnnnnnnnnnnnnnnnnnnnnnnnnnnnnnnnnnnnnnnnnnnnnnnnnnnnnnnnnnnnnnnnnnnnnnnnnnnnnnnnnnnnnnnnnnnnnnnnnnnnnnnnnnnnnnnnnnnnnnnnnnnnnnnnnnnnnnnnnnnnnnnnnnnnnnnnnnnnnnnnnnnnnnnnnnnnnnnnnnnnnnnnnnnnnnnnnnnnnnnnnnnnnnnnnnnnnnnnnnnnnnnnnnnnnnnnnnnnnnnnnnnnnnnnnnnnnnnnnnnnnnnnnnnnnnnnnnnnnnnnnnnnnnnnnnnnnnnnnnnnnnnnnnnnnnnnnnnnnnnnnnnnnnnnnnnnnnnnnnnnnnnnnnnnnnnnnnnnnnnnnnnnnnnnnnnnnnnnnnnnnnnnnnnnnnnnnnnnnnnnnnnnnnnnnnnnnnnnnnnnnnnnnnnnnnnnnnnnnnnnnnnnnnnnnnnnnnnnnnnnnnnnnnnnnnnnnnnnnnnnnnnnnnnnnnnnnnnnnnnnnnnnnnnnnnnnnnnnnnnnnnnnnnnnnnnnnnnnnnnnnnnnnnnnnnnnnnnnnnnnnnnnnnnnnnnnnnnnnnnnnnnnnnnnnnnnnnnnnnnnnnnnnnnnnnnnnnnnnnnnnnnnnnnnnnnnnnnnnnnnnnnnnnnnnnnnnnnnnnnnnnnnnnnnnnnnnnnnnnnnnnnnnnnnnnnnnnnnnnnnnnnnnnnnnnnnnnnnnnnnnnnnnnnnnnnnnnnnnnnnnnnnnnnnnnnnnnnnnnnnnnnnnnnnnnnnnnnnnnnnnnnnnnnnnnnnnnnnnnnnnnnnnnnnnnnnnnnnnnnnnnnnnnnnnnnnnnnnnnnnnnnnnnnnnnnnnnnnnnnnnntatcaggcttctgtgaattggagtcttgtgatttctgactctgcattttcatattggtgtacagaaaagtaaagctttttgtgtattaatttttaatcttcttttgtgttttgctgttcattgctgctgctgtttggttggttggacccagagcctcacacctggaagagagcttgctcaggtctacaagcttccggtccgaagcctgaaggtctttacctgcaagaaggagcacgttgtccacaaatgcagttgaccaagcttctgctttttcctgtctatgttactgtctgtctttttcttgccttagcagactttgtctaattaacagatatctctgttaacaggttaattaattaattggtacctcttaacttttttcttcagtttgtattttattttatttttatttttatttttattttttccagacagtgtttctctgtgtagtcctggctgtcctggaactcactctgtagaccaggctggcctcgaactcagaaatccgcctgcctctgcctcccaagtgctgagattaaaggcgtgcaccaccactgcccggccagtttgtattttaaatgatcaaaaattcagattctaccagcacttgggaggcagaggcagaagaatcactgtgagttttaggccagcctggtctacagagtgagttccaggacaccaggagagtctttgtctcaaagaagtacacaccacacaccacacacacacaccacacataccacatacacacacacacacacacacgcacacacaccactcactcgagtgtgcaagagagagagagaaaggggcggggggtcggggagcgggagagagagaaagaagaaatcaggttctgtgcagtttttgaaataatgagatgtgatttaaattcaattttgtatttttttaactctctaattttagagcaaataggtcaaaaattgctcctgttttcattctcactgacagagaaatgcagagaattttttggacaggccagcataaa

SEQ ID NO: 844 - DNA, 2328 bp, Mus musculus
atggagcaagtggagatcctgaggaggttcatccagagggtccaggccatgaagagtccggatcacaatggggaggacaacttcgcccgggacttcatgcgattgagaagattgtctaccaaatatagaacagaaaagatttatcccacagccactggagaaaaagaagaaaatgttaaaaagaacagatataaggacatactgccatttgatcacagccgagttaagttgactttgaagactccatcccaagattcagattatatcaatgcaaattttattaagggtgtgtatgggccaaaagcatatgtggcaacccaagggcctttggcgaatacagtcatagacttctggaggatgatatgggagtataatgttgtgatcatcgtgatggcctgtcgagaatttgagatgggaaggaaaaagtgtgagcgctactggcctttgtatggagaagatcctataacatttgcaccatttaaaatttcttgtgaaaatgaacaagcaagaaccgactacttcatccgaacacttttacttgaatttcaaaatgaatcccgtcggctctatcagtttcattacgtgaactggccagaccatgatgttccttcgtcatttgattctattctggacatgataagcttaatgaggaaataccaagaacatgaagatgtgcctatttgtattcattgcagtgcaggctgtggacgaacaggtgctatttgtgccatagattacacgtggaacttactgaaagcagggaaaattccagaggaatttaatgtatttaatttaatacaagaaatgagaacacagaggcactcggcagtacaaacaaaggagcagtatgaacttgttcatagggctattgctcaactgtttgaaaaacagctacaactgtatgaaattcatggagcacagaagatcgctgatggtaatgaaattaccactggaactatggtcagttccattgatagcgagaagcaagactctcctccgccaaagccaccgcggactcgaagttgccttgtagaaggggatgccaaggaagaaatactacagccaccagaacctcacccggtgccacccatcctgacgccatcacctccttcagccttcccaaccgttaccactgtgtggcaggacagtgacaggtaccacccaaagccagtgctgcacatggcctcaccagagcaacacccagccgacctcaacagaagctatgataaatcagcggacccaatggggaaaagtgaatcagctattgagcacatagataagaagttagagcgcaatttaagttttgagattaagaaagtccctctccaagaagggcccaaaagttttgatgggaacacactcttgaataggggacatgcgattaaaattaaatctgcttcatcttctgtagttgacagaacctctaaaccacaggagttaagtgcaggtgccctaaaggttgatgatgtatctcagaattcttgcgcggactgtagtgcggctcattcacacagagctgctgagtcgtcagaggagtcccagagcaactcacacacacctccacggccagactgcttgcctctcgataagaaaggacacgtaacgtggtcacttcatggacctgaaaatgccacacctgtacccgactcacctgacggcaaatccccagataatcattctcagactctgaaaaccgtgagttccacacccaactccaccgcagaagaggaagcccacgatcttacagagcaccacaacagctcccctctgttgaaagctcccctcagctttaccaaccctcttcactctgacgactcggactcagacggagggagctctgatggtgctgtgaccaggaacaaaactagcatttcaacagcaagtgccacagtgtctcctgccagtagtgctgagagtgcttgcactaggagagtattgccgatgtccattgccagacaggaagtagcaggcacgccgcattcaggtgctgagaaagatgctgatgttagtgaggagtcgcctcctcctttacctgaacgaactcctgagtcttttgtattagcagatatgcctgtaagacctgagtggcatgaacttccaaatcaggagtggtctgaacaaagggaatctgaaggcttgacaacctctggaaatgaaaaacatgatgcagggggcatccacacagaggcttctgcagactctccacctgctttcagtgacaagaaagatcaaataacaaaaagtccagcagaagtcacagatattggttttggtaatcgctgtggaaaacctaaaggaccaagagagccaccttcagaatggacatga

SEQ ID NO: 845 - protein, 773 aa, Mus musculus
MEQVEILRRFIQRVQAMKSPDHNGEDNFARDFMRLRRLSTKYRTEKIYPTATGEKEENVKKNRYKDILPFDHSRVKLTLKTPSQDSDYINANFIKGVYGPKAYVATQGPLANTVIDFWRMIWEYNVVIIVMACREFEMGRKKCERYWPLYGEDPITFAPFKISCENEQARTDYFIRTLLLEFQNESRRLYQFHYVNWPDHDVPSSFDSILDMISLMRKYQEHEDVPICIHCSAGCGRTGAICAIDYTWNLLKAGKIPEEFNVFNLIQEMRTQRHSAVQTKEQYELVHRAIAQLFEKQLQLYEIHGAQKIADGNEITTGTMVSSIDSEKQDSPPPKPPRTRSCLVEGDAKEEILQPPEPHPVPPILTPSPPSAFPTVTTVWQDSDRYHPKPVLHMDEQHPADLNRSYDKSADPMGKSESAIEHIDKKLERNLSFEIKKVPLQEGPKSFDGNTLLNRGHAIKIKSASSSVVDRTSKPQELSAGALKVDDVSQNSCADCSAAHSHRAAESSEESQSNSHTPPRPDCLPLDKKGHVTWSLHGPENATPVPDSPDGKSPDNHSQTLKTVSSTPNSTAEEEAHDLTEHHNSSPLLKAPLSFTNPLHSDDSDSDGGSSDGAVTRNKTSISTASATVSPASSAESACTRRVLPMSIARQEVAGTPHSGAEKDADVSEESPPPLPERTPESFVLADMPVRPEWHELPNQEWSEQRESEGLTTSGNEKHDAGGIHTEASADSPPAFSDKKDQITKSPAEVTDIGFGNRCGKPKGPREPPSEWT

SEQ ID NO: 846 - DNA, 122656 bp, Homo sapiens
gttatttataaaattttaatttttctttgaatgttaaatgaaacagcataagaagtatgagatagaaaggtcagagaacagggtggatttaatgactgtattctcttgcagttagcattaattattactgtatgtagcctttgttgtgtaacactcttaagttttcattgagtggagaattatctgggttttagttctagttctgccatctatgtgatcttgggcaaataatttaatttctctaaagttatgcattattatccttactagtattctaatgcatatataaagaatatagggtcgggtgcggtggctcatgcctgtaatcccaacacttcgggaagttgaggcaggtggatcacctaaggtcaggagttagagaccagcctggccaacatgctgaaaccccgtctctaccaaaaaaagaaaagaaaaaaaaattagccaggcatggcagtgcacacctataatcccagctacttgggaggctgaggcaggagaatcacttgaaccctggaggtggaggttacagtgagccaagattatactactgtactccagcctggggacaaagagagactccttctcaaaaaaaaaaaaaaaaaaatatatatatatatatatataaaataatacctgacctacctacttaagggtagagttataaggataaacaggatgtgatatatgaaaaagctctgacatattaagctttgaaatacacattgaatattagagagatttcatcccttccaaacttctcttcatttttatgtgtcttctgaaaattttatgttaccgtaggaaactaaaaagttatgctcccttactgccagtttcctatttattagatgacacatttcaacaaaaaactcagattaaaaaatggtcaacatttgctgtgactatggctagaaagaaggaataaataggataccaggataaacaagaatttccctagcttctcattcactctctcataacctcccacccaaaagtctatcttaaatatagtttcagagtatggagaggactgaggaatgcagaatgaaatgacaggttaatattagaaatgccattgtgggagactctcaggaatgatttcaaccttcacctgcagtttcacttaaatcacaccaggtatagaatcattgtgactcagtggtttatgcaacaatctggaaactcaggacctgtaagctttggccatgtgtctgacatttgttttccacaagtaagctaatcatgttcactcactgtgcttcatttagcttttatctattaatgaagaaaatgatatgaaattacttcccagggttgtaaaaaaaaaaaaaagaacagaactcacaaagagctataaaatgctgtgaaagccataacaaaggtagcttgtatgagtatagatgtgaaaacaccccaaaagttaaaatttccacacatttaaagcattaattttacctgagctaagggaaaaaaaaggtaatatgaacatgaaacaagtagatcatcctgaaacctcttttggattattagttttaaattccttcccactcagaccttcacaaaagtagtaagaagagagatttttttaaaaatgaaatttagctttcttctcattcctcctgtatttacccagagtgatgtagctagtgagtaggaaaagggcctaaagagatgaggaaggaggtaaaaaagcacaagacccagaaatcattaacggtctttaaccagttattattttgtgttttgtttttcttttctttttgagacagagtcttgctttgttgcctagggtggaattcagtggcatcagagttcactgcagcctcaacctcaacctccgaggttcaagcaatcctcccacctcagcctcccaagtagctgggactacaggtatgcaccaccacgcctgggtaatttaaaaattttttttgtagagactgggtctcactgtgttgcctaggctgttctcaaactcctgggctcaagcaattctcctgtctcagcctcccacagtgctgggattgcaggtgtgagccgttgcgcctggcctattttgtgttttctatgagtaagtatatagtacaccactgctgaaacattatctcattaagccagcaccaggtggctttcctaaaagaggaaactgatgcttagacagcttaagtgacttaccctgaacaagaaatggaacaggtttttgaaccttcatttctctgacttcagagcccacgctctttattactgccctattctgtttcaagaaaagcaaaatttacttatggaataaatgtcaactgaacctctcctaaaagtttatcggaagtcaggttactctggagattctccccatctccccccatggccatatgggttatgttgtgacatacccacatattgctgcatgtctgcttaatgttcttttctttcctttaaaagtttattttattttactttatagatacggggtttcgccatgttggccaggctggtctcgaactcctggcctcaagtgatgtgctcgcctcagcctcccgaaatgctgggcttacaggcgtgagccactgagtgcatcctaatgttctcttcctaatcagattctttatactttctactctctctcaaggcttcaaatcgctaattctaccccatggcatacattcagcttctgcccttgctgcataatgacttactctttctaggtttccaaattcagattcctaagagtgagaactgattggcccagaccatcttcttataccaggacataggttgctggccagtctgtatgggctgattaacttctcaactgcccaaacacgtggctgtgacagaggataggcagagcagtaaatttccctgagactatagtataggtaggtgagctttctaaagctggacctaccatgtgccatttttaaaaatctcccaaacaagatctgcctccttccacccagcttttttttctgagacagggtcttgctctgttgcccaagctagagtgcagcggtacaatcatggctcactccagcttggaactccggggcttaagcaatcctcctgcctcagcctcccgactagctgggattacaggcacacatcaccacgcctgggtaatttttgtatttttagtagagacagggtttcatcgtgttggccaggctggtctcgaactcctgacctcaagtgatctgcccgccttggcctcccaaagtgttgggattacaggcgtgagccagggcacccagcctgcatttcttactttttattttattttttttgagacggagtcttgctctgtcactcaggctggagtgcagtggcgtgatctcagctcactgcaagctctgcctcctgggttcacgccattctcctgcctcagcctccggagtagctgggactacaggctccagccaccacgcccggctaattattcgtattttttttttttaagtagagacggggtttcaccgtgttagccaggatggtctcgatctcctgacctcgtgatctgcccgccttggcctcccaaagtgctgggattacatgcgtgagccaccgtgcccggccacttcttacttttatttttgttgtttcatgtattggctcctaatatctctcattcccttctctctcattcacaatttatcagaaaagtaccagattactattttcctcatttccataattttgcttctatcctcagaaacctcttgtggctcccatgcctacagtatcaacattctccagagcctagtctactttggagctttcacatctatacaaatgttctacttcaaacttctgctttgctgtcttcatgcttatcacttctcttgcctgggcgttctacttcctgttcaaacctaatttaacttaccctttaaggtctacctctgtgaccaccccatgctgacagcccggtccacaattctctctcctcagaactgttaaatcacttattatctgtatcactctttcacatttattaacttaaagtaactaagagtttattgtttttcctgtctcctgaactaagatattcattccttaggagtaggagccatctctataacatttttgtatctgacacacacagcataaaccctcatatgttgatatgttaaaaagccatatgtagattgaaacaagacctaaatgtattgaaaagaagaaaaagccactttgagaggccgaggtgggtggatcacgaggtcaggagatcgagaccatcctggctaacatggtgaaaccctgtctctactaaaaatacaaaaaaattagtcaggcatgggggcgggcgcctgtagtccaagctactcgggaggctgaggcaggagaatggcatggaacccgggaggtggagcttgcagtgagccgagatcacgccactgcactccagcctgggcgacagagtgagactttgtctcaaaaaaaaaaaaaaaaagaagaagaagaagaagaagaagaaaaagctagcaaggtaccaaggaaagcactgctaagcctttccaaagaactgaaatcctggcggggcttggtggttcacgcctgtaatcccagcactttgggaggccgaggtgggttaatcatttgaggtcaggggttcgagactagcctggccaacgttgtgaaaccccatctctactaaaaattcaaaaaaattagccgggcgtggtggcaggcacctgtaagcccagctactgggaggctgaggcaggagaatcacttgaaccaggaggctcaggttgcagtgagccgagatcgcgccactgcactccagcctgtgcgactaaggaagactccatctcaaaaaagaaaaaaaaagaaaaaaaagaattgaaatccttggagatagtttacataaattttcccaaacctagcagtagatgccaaaggtagccgctgagaactcaagaaactctcaagtgttgcaagaaagagagagaagcttgccaataagacgaaacattttaaaaaagactaaaaacaccagccaaaatgggactcaataccttaaacaagtaacacttcttacccaacactataccaaaccgtactagactgttacacaacttgttcagcatatcttctttaccgatcattgtctggttggtacattcttttgaaccatcaaaagcagaggcacttctgatcatccttccatttctcttcctacagtcgaatttctctcccatttctgaggggaaagggccatctacaataagcatgatcaagccctgattctggcatttcctcacatcccgtgaaactcagtctcagtatctggttaaagtaaaatactgcgggcccttttttcaaataaagtttaccttagaaattaaactattcctctaagtgaatttttgaaatacagagcaaaactgtatctctttgcatgcacacacatatataaatgcataggaaaaaatttggaagggcataacttgaagtgcatttttttcttttttcttttttttgtttttttgtttttgttttgttttgttttgttttttattgatcattcttgggtgtttctcacagagggggatttggcagggtcataggacaatagtggagggaaggtcagcagataaacaagtgaacaaaggtctttggttttcctaggcagaggaccctgcggccttccgcagcgtttgtgtccctgggtacttgagattagggagtggtgatgactcttaatgagcatgctgccttcaagcatctgtttaacaaagcacatcttgcaccgcccttcatccatttaactctgagtggacacagcacatgtttcagagagcacagggttgggggtaaggtcacagatcaacaggatcccaaggcagaagaatttttcttagtacagaacaaaatgaaaagtctcccatgtctacttctacacagacacggcaaccatccgacttctcaatcttttccccacctttcccccctttctattccacaaagccgccattgtcatcctggccgttctcaatgagctgctgggcacacctcccagacggggtggtggccgggcagaggggctcctcacttcccagtaggggcggccgggcagaggcgcccctcacctcccggaagggacggctggccgggcggggggccgacccccccacctcccacccggacggggcggctggccaggcagaggggctccccacctcccagtaggggcggccgggcagaggcgcccctcacctcccggacgggacggctggccgggcggggggctgacccccccacctccctcccggacggggcggctggccgggcagggggctgacccccccacctccctcccggactgggcggctggccgggcggggggctgaccccccccacctccctcccggactgggcggctggccgggcggggggctgacccccccacctccctcccggacggggcggctggccgggcagagggactcctcacttcccagtaggggcggccgggcagaggcgcccctcacctcctggacggggcggctggcgggcggggggctgacccccccacctccctcccggacggggcgactggccgggcgggtctgacccccccacctccctccggacggggcgactggcctggccggcggctgacccccccacctccctcccggacggggcggctggcctggcggggggctgaccccccccacctccctccgggacagggtggctgccaggcggagacgctcctcacttcccagacggggtggctgccgggcggagggtctcctcacttctcagacggggcagccgggcagagacgctcctcacctcccagacggggtggcagccgggcaggggcgctcctcacatcccagacggggcggcggggcagaggcgctccccacatcccagacgatgggcggccgggcagagacgctcctcacttcctagatgtgatggcggccggaagaggcgctcctcacttcccagatgggatggcggccgggcagagaggctcctcacttcctagatgtgatggcggccaggcagagacgctcctcacttcccagacggggtggcggccgggcagaggctgcaatctcggcactttgggaggccaaggcaggcggctggaaggtggaggttgtagcgagccgagatcacgccactgcactccagcctgggcaccattgagcactgagtgaaccagactccgtctgcaatcccggcacctcgggaggccgaggctggcggatcactcgcggttaggagctggagaccagcccggccaacacagcgaaaccccgtttccaccaaaaaaatacgaaaaccagtcaggcgtggcggcgcgcgcctgcaattgcaggcactccgcaggcggaggcaggagaatcaggcagggaggctcttttttttttttagagacagagtttcgctcttgttgcccaggctggagtgcaatggcgtgatctcgctcaatgcaacctccgcctcctgggttcaagcaattctcctgcctcagcctcctgactagctgggattacaggcatgcgtcaccacgcccggctaattttttgtatttttagtaaagacggggttggtttcaccatattggccaggctggtcttgaactcctgacctcaggtgatccgcccgcctcggcctcccaaagggttgggattacaggtgtgaaccatcgcgcctggcctttttatttttattttttgagacagactctcgctctttcacccaggctggagtgtggtggcacgacctcggctcactgcaatctccgcctctcaggttcaggcgattcttctgcctcagcctctggagtacctgggactacaggcgtgcaccaccacacccggctttgtatttttagcagagacagggtttcaccatatcggccaggttggtctcgaactcctgacctcaagtgatccacccaactcggcctcccgaagtgctaggattacaggtgtgagccactgcacctggtctgaagtgcatatttctggagtggatgtattagttggattattttaacagaaatattttcctttttttgaagaagtaaataaactatatcctgttacacctattttcttttcttttttttttttttgagacagggcctcactcccgtcgcccaggttggggtgcaatggtgtgatcacagctcactgcaacctccgcctcccgggttcaggtgatcctcccatctcggcctcccaaagtgctgggattacaggcgtgagccaccgcgcccggcctacacctattttcttcaatgagtttttcactaaattccatagtgctcctaactttcatctgagaaagtattctaccactgatatttcctattataaccaaattcgctgaccaatctgctctgtaaaaaaaggtttgtgggtataaatgacgaaagtcagttcatggatcaaatccttcagttctgtcacattgtgagaggccactgttgtgaaagtaaaataacttctagttacggctctgctaagaatacgctgggggatgtcaggaagtcgctttatttgtaaaatgatgagttagaccagaatatattctctgatagaagtttacaaagatgaataaagatttataggctaggcgcggtggctcacgcctaaaatcccaacactttcggaagctgaggatccctagtgcacaggaattcgagatcagcctgggcaacctggtgagacccccttctctaccaaaaataaataaataaataaataataaatttttaaaatgtattagctgggcttggtgacgtactgaggcaggaggatgccttgagcccaggagttcaaggctgcagcgagccgtgatcatagcactgcactttggcatgggagatagagcaagaccttagctctaaaaaaaaaaaaaaaaaaaaattaatagatttataaagtccattctatggaggaaagtctcttattcagttatgaactgctgcgaacctaaaggcaggaaggcaaattcccttcagttcggcaaacacgaagaccccacattcgcgtcgtctgtgaagaaggcactccgaacctcaggcgctcactcgccaggtttaagaggatgagcaaagaataaaagtcctctcacccaggaagcgtttcgcttcccttagctggagccacgctccaaggtgccaaagcctaattgctgtccactctcaccaatccgttagcaagatgagcatctacctgctgcgaacgtggcggtgacactactacagctcccagcctgcctcccgcccgcccccactcctggactccacagaccgtgacttgtagtcccagcccacggctggcggcggtgcgggactcctgaaaactgcttttcctccctagtaggcggtgagaccgcaaattccatcagaatcctactctgacccactagggcttggcccgctcagagtcgcattccctcctccaaatgaaccaactctcctcccagcgatactccgacctctgagcaccccgggcggggccacgccccggaaatggagtcaggtctccaggccgcccgctgaagtgccttccagccactccaagcggggctggggccggcggggcgggcttgggggcgtggccgggaggcgggcggggatgcatctgcgggcgcagcgcttggggcggagccgcagcgcgaggccgcgcatctgggtggcggcggggacgcgcccgtggggagaggcggctgcggctgcggctgcggctgctggcggggggtgggggggaggaggaaccgggaagggggggcagggcgagcggagagctagctgtgttcctgaggcggcggcggcggcggcggcggcggcggcgtctccgacggaggaggagggcggggaaggaggatggagcaagctgggggttggggttggcgctagcgcagcggctcgcctggtactgtgggagagcggcggctgctcctggaagttgtggtgtcgggagcccagccggtgccgccgcagccgccgcctagggcggtggggaggaggagggagccgcggggcttggcggggtcgggagggagggacgtgctgggggaacgagctggggaagacggagcgggctctgtgccgggcgggcgggcggcgggggggccagcgaccgcagccggggggacgcgggaggatggagcaagtggagatcctgaggaaattcatccagagggtccaggccatgaagagtcctgaccacaatggggaggacaacttcgcccgggacttcatggtgagtctctcccctcgctgtcgcgttttcttgccggcgccggagcccatcgccgcctctcccggccgggccgccagtgctttgtgtacctctgtgaggagaggggcggagggggcgcgcaccagccgggtgagccgggtggtctcggaggccagcgggaggcgagagcgcctccccccgtggcctcctttcttctcccatgttcgcgacccccgcgcgggttcccgggacgcgaagggagcggccgcgcggccgagcccgcagcctgcaccgtggctcgcgaccacctattgtttaccgggccgggagccgtaggcaagtgaggtgcaggccgggggggggggctcgcgtttccacacctccccgcgcagttcgctcctcccaggagggtcgaggcaaggtatctggctgtgaccgggaggagtgcagatcgtggctgacagaggaacgggggtattgaggttggcactaactcctgggatccctttgctctagctggtctcaaagcgggcagggtaggacttaggccgtttctggggtcgcagtcatgatctccaacgcttgggaaaggattgcccataaggaatctcatgggtttacctaatttccatttacccgcgtcccgcttctcctctcctgaggcccaggtttgaggtggtcttggggtccgtgtgactataggttcaggggataagtgtgggtgggggaattatcctgaaggaagccagccgacttcggactccccaggggatattgccgaaggcggaggggatgtgactatcacttcctatccggggtgggggtggggaacttgggaacaatagtcctggtggggcggaggcgacgctacgggccgaagccctgaactgggagataaccttcccagcgcccccccgcctccgccaccccctactttccgccctctgcttgtgcaggcagtcttgagaggaggtgaaggttaaaagtcttgttcatgaaattgctctagatacactattgctttagcacactgtgagggggtcagatccgaaggcgtgagaccagaagtcgacttcctacgttacccacccccccaacccccgccctttttatttttctgctggacaatgttccctctagggttgtttcccggcttaggaggcggtggttgcggctgctgctcctacggatattgcgcaagactggggcgttggaaaccctgtaggtctggggaatgaaaaaggaagtgggactttgggaagtggttgctccttagtcttggcgggggttgggaatgggaaataagctggggaaaatttttatcttgggtaaggtacacctcgaagaataatcacttaattctgaaatctgattatgagaaggatacacagttaatgcctgtaaaatgaatgggcagcaaacattggctagtttttattttttgtttaaaaagtacagtagtttttatggtggaggtgatatgacttagtagtgaatactttttcacgttttaaagagactggtctagtaaagctttagcgttaaatttttaacagcttataaaataggcccttgaccatacacagtattatactagcatcgttgagctttgtgattcccgcctccccagaccaataatagaggacggaagtaaagttttctcagtatcttttgaagattgaaaatataagttaaataatctaacttattccttattaaaaataaaaatattgcttatatttaaacatttgctcttgatatttagcctatgtatttttgaaaaattactttttgatctgaaagggttaaggaaaacggcattttccctttttactattgagagtttttattgtcttggtatcttttgaatggtgtcatttacagcaattggatggagtcccttttttactactttctagcaaaagtagaagaaaatactttgaatatttaagatgtttaaaactagtttttttgggttttgttgtttggttggttggttggttggttttttttttgagacggagtctcgctctacgctctgtcgccccggctggagtgcagcggcgcaatctcagctcactgcaacctctgcctcccagattcaagcgatgctcctgcctcagcctcctgagtagctgagattataggcacgtgccaccacgcccggctaatttttgtccgaagtagccgggactacaggcgcaagctaccacgccctgctaattttgtatttttagtagagatggggtttcgccatatttgcaggctgctctcgaactcctcatctcaagtgatccatctgctttggcctcccaaagtgctgggattacaggcgtgagccaccatgcccggcctaaaactagttttttaccgtcttactttggttatggaagaagagatggtgtggtccctggtcatttcttgtttgcatgctagtcaccttgttatccctaggcatataccgtcaggaaggagcattgtttggtgatgcgggccatcaggacaggttgcccagcctctgaactcctgtactggagaagtggccttagggttcatgctttggggatgagtcagggattcctattggagagttcatttctttctttctttctttctttcttttttttttgagatgtaacacctcgctgtgtcgcccaggttggagtgcagtggctcaatctcggctcactgcatcctccacctcccaggttcaagcgattctcctgcctcagcctcctgagtagctgagattacaggcgcatgccaccacgcctggctaatttttgtatttttagtagagatgggatttcaccatattggccagactggtcttgaactttgatctgactgactttgtgatctgcccgcctcagcctcccaaagtgctaggattacaggcatgagccaccgagagttcatttctccaagagtaaatgagtttcctttttcttccatgatacctaggtatagctaggtgattctacattagagatttgatgactaaggctattcttttatagggctttttttttttttaatttcctgacttgataagcaatagctgtaattaagacagccggtagttggtgctgctttttcccctgactggaaggctggagaggaactatgttctcctggcatggaaagagaaaaaaaagattagcttatagattctattatttttaaattctgatgtcgattaaaaatgcattttaaattcttaacattttatgactgagccttagagataatgtagctgatataactgttccatcataaaataatgtttattccaaatttggaaattaatagaataataataatgccttacacttagaccacagttcaaatgaacactccacttgcctgactggtgatgatgctcttttcgctctatccagctgtcctacagtcctgtcatttaaaggctacctctgttaatattttttggttttgttttgttttgttgttttgttctgtttttgagacagggtctcactctgtcacccaggctggagtgcatggttgcgatcctggctcacggcagcgtcggtctccctgggctcaggtgatcctcccacttcagcctccagagtagctggggctatgggcccaccccaccaagccctgctgatttttgtattttttgtagagacagggtttccccatgttgcccaggctggtctcaaactcctgggctcaagcaatccacctgcctcagcctcaaagtgctggggttacaggtgtgagccaccgtagccggcctactacttggtaactatcttatatcttaattttgtttctttatgtttgagtatttaggtcattctactttctgctgttacatatagtaattctgtgattaacatttttgctgaaactgacatttttcactgttgcataagatagcttcccaggagtactaggtagacgtatataaacatttaatacatgttcataaacttgaaaaagttttgtcagtttatacaactgtcataatgtatgagtgttcatattataattttcttgatctttatttgatggttgaaaactgatatcttgttttaacttgaatttcttgattactattgaggatagaaattttccacctgtcattactattctatgagtgtctattcctggccttggttgtgccccatactgttaaagaggagacagctaaggtacccagactgtgcagaactatgttgcctagatggttatttgcatgttgaaaacatgctaattttgctaataaattagcaaatagctaatttgtggctgatccagaatttgatctcaattatctctacttttaatatttacaaaatgagagataaatgtataaagtagggtggtgcacattcatgtttgacagacctaggttttaactccacacagactccctctgatggctgggggttggggaggtggtcctggaccatactttgagaaccagtgagctaatacatggtaaatgataaaggtaatgctgggaaagttaggtagaggtctttttgtgaaggatcttacatctatgctatacttagattttattctacagaccgataatagcaattctggacagtctgcattgtaactcctagagacatggagaaagtagggaggtgttaagaaaatagacatgctggtccactccagcgtcattcccccatctcaccttctccagcctgctccttgagttgtactctgaaccttcacttacttagataggttctggtagaaaaggtgagaatcattagtctgggtttctggagcactactgagtcttttaagaaaggtaaacagtcatttgtgttttacaaagttgaatctgatagcagtatgaagggtggcattttggaagctgttgaaatataagaagtgagatgtgagggcctgaagtgaactgagatggggaaatagagtgtatacaacacatctgataagaattaagaaaggagtctcaatgattcattagatgtaggtagtaaagaagaaaagagtatagtgttatgactcgcaaaatatctagcttggtatctgtcacccaagctagagaataccatttggtagagtaaggagtgagggaggagaaacaagtagaggagaccaaacaacattgtaggaggaagtttcagggggagaagaggataaatttaattttcaacatgttaaaactgcggtgcctctgagacatccagtagaaatgtagagctcaagatttctgacaggacggagttaaagatgtaggcatcataatataagcatgtaggagatagtcgacagcatgggagtgaatgagcttattccaacaaacttatagagtgaccagctttaggttgaagaacatcagtcttaaaataacagccaaaagaaggatatactagtgattgttcctgagaaggtgtggtcaaggaggagggaggagaaccagagatgtcagaaaagccagggagagtttcaagaaaggagttattaccagagtcaaataatgctgggaggaccggtaaggtgaggttgagaaagtacctattccatttggcacataggagtgctttggtgactagaaaaaacagtttgggttggggtatgggaagaagctagattatagggtgaagggtgggtttagtgtctttccattttttttaacattttgaaagtagatggtaggagctagaggaagattggttgaaggagagtgtgccccttccactgccttttttttttttttttaaagagagaactagagaatatttttcttattatttcttgtctatgtgtatatcctctttagcctgggaagatcttatgttgcagtcttgataaatataaaaattttaatcatttgtttattcagtgttgtagcttataggtttaaaaaaactaataatagctttattgagatataagtacctaccataagatttattcatttaaagtctatgattcactagttttttattacattgatgaagttatgcaacaataaccataatcaattttaggacattttcttcactttctgtacccattagcagtcactccccgccttcccataagccccaggcaaccacaaatctaccttctgtttccatagatttaagtattctggacattttatataaatggaatcatacaatatgtggtgttttgtgactgactccacctaacatgatgatttcaagtttcatccatgttatagtattgatccgtagtacttttggcctttttatggctgaataatattctattgtatagataccacattttgtttatccattcatcgtgttgatgggtatttgaattgtttccactttttggctaatgtgaataatgcaactatgaacatttgtgtacaagtttctgtgtggacacattttcaggtctcttgggtatatatctaagtgtggaattgctcagtcacgtggtaacactatgtttaacattttgcggaactgccagactgttatccaaagctgctgcacatattacattccaatcaggaatatatgagggttccagttcctctacatcttcaccgatacttgttgctgtctttttgattataggcatcctactgggtgtgaagtggtatcttcttgtggttagcttgtaagattttgtgtgtcttaatttgtctttcaaagctagagtgataggaaatattttccagtccttgcatttgagctaatcttagtgcttacccagtgccactggtttagttatggttttcttatccatcctttgatgagtattcacctaaacatatttacatcaactaacttcagaagtggaagtgaacttttaagtaactctccagacatggttcactgagacagtaaactaaaaatttactttaagcattctcaagaatgttttactttatttactttcaaaatatattaacttttttccatcaatatttgatatttaacttggaaaaaggatttttaaaggatgaaactgaaagtaagacattaacatttaggtggctgtaggttttttgttcatatgttaaatacttctgtgtttctgtagcactgagttcattagattcataaatatttacatttctgtcttccccagactgaacgcctcccaggctagagactgggacttaattatccctgtatccccattgcttaatatagtgcttggcatttaataggcactaatgtccattgcatgtgcagacattgtagacaaacttaatgctgtaagacagatttattcttcaggtgaattcttcagtggtccaagggtttgtcttctagacgatcatgagaactgcttcttcccctcctacacagatgtgctcacataactcgttgtattttcagtatccactgaaaaagaaaatacaagataagagctacattgaattcaaatattttaaataaatatgattttattagctgcagtttcttaaggtaacttctgtatttgtgcatcccacacccaatggatcatactttgttgacattgtcttagagtattaataaaatgtcttttaaacttttggctttggacttaataaaatcaagatatcatgtcatcggtatctcttcaaaaatagtgaatttgtgggtatttagagagtgattacaagtgatatctgttgttctctacttgcctctagtttctttcctcatccagtccattcaacacatcatactcactttcaagtggcagcatctgtaggctaatggaaaccatactggttgtacaatcaggagatgtgggctgcactggaagcatggtttaatttttattattaaaaatataagttaaaaaaactcattgctccctttgatgaccattacaattattggaaattttaaatgtgtattttgaaagtcaattcaaaacatatgatccaagtgctgctcctttttcaaactgtaattatgtctgtctctctttccagagagatttgattccctgatttttcccttctcagctccctccaattttaaatatatatatatagttttttttaataattaaaaaaaaatacttcacctggaagttttcatccaattttgtaactttggtcctagttgagaatcacaggcctataggataaagtctgtacttcttagcctggcattccagaaccttcttaacataatgtcacagtacctttccagtgttaaacttctatactctggtatgtatcctctcttctttttgaaggaagctattcctggtccttgagcatacctactaaatgaatgaaatcttgcttatctgtggttgtactgttgaacatactttttccctcagaaagcttcccttttattttattttattttatttttttgagacaaagtcttgctttgttgccaggctggagtgcagtggcaccatctcagctcactgcaacctccgcctcctgggttcaagcaattctgctgcctcggtctcctgagtagctgggattacgggcgcccgtgaccacacacagctactttttttatttttagtagagatggggtttcaccatgttggccaggatggtctccccttttattttataaaccagtacttggaagatgagaaagctaaaaatttaaaatgacttcaccatgttcaccaaaaactcagaagcaaaaatgtgattaattctcaccttctagaataaatattttagcacagttaatcttaaagcactttttctcctttgtaaagtttgatctttaatatcacaagaaaaaaagcctttcattagatttgagttgaaaacttgataaggtaaatcaggtgatatgcaatttctaaaccactagtcttttccaaatatgagttgaactcctcttccagcattttatatttcctgtagtatttaagtttctttagattcatgcagtcaaaccttgacaattatctccttccttctgaaatcacacaaaaatcttgtttgcatttgtacagtattgtagggtctgtagctggcctatggcagatataagaagcaaacagtagttgctccctaaaagttttttttggagaaagtggagtgtggactgtattagtccattttcacactgctatgaagaactgcccgagactgggtaatttataaaggaaagaggtttaattgactcacagttcagcatggctggggaggcctcaggaaacttacgattgtggtggaaggtgaaggggaagcaaggcaccttcttcacaaggtggcaggaaggagaatgaacatgggaggaactaccaaacatttgtaaaaccatcagatcttgtgagaactcactatcaggagaacagcatgggggattataattacatagggattataattcaagatgagatttggtggggacacaaagcctagtcatatcgtggaccatgataatctcagaggctttgggaagtgtgctaatatctacatttcctgtaataacttttatatctaatcggcatttaaaaagctattttaacaacatttgagtgactgtcctgataggctctgaaggaatgcaaagatttgtctctgtcatccatccatggtctctgtcatccatccatggtctctatcatttatccattcatacagaaggtatttatggagatacctgagtgcccactatgccctaggtactgtgtttttgaattgacagttgaaaacatggcagtactctgttcaggaagtttactaactgaacagacctgtgagaagcagcgggacttttcctgggggcagtgggtgggcttcaggggaatctttgaacccttttaaattatatataatattttttgtgtgtaagcccattttagggggaagaaagttcatagctcttagtttctcaaggagtttgggtcccttagactagtggaaagataaggagtttaggagctatacagtcattaatttctatcctggccctgctgtgattctgagcagattatctagagaagttggggctctaatacatacctggaaagaacaagataatatatgtaaagtttctaacatagtatatagaaggtagtcaaaggaatttgagatgacatactgctccagtggaagtatattcggaatataagccagagagacaggagagcctaaatctgtctgaatagatcatggacagtttccacaaagatgctacatttgagctggtttttgaaggaagagtttgtcaggtgaactaggtgagtaaaaggcaacaacactttcaaagacttggagataaacagagatagaactgtgggttttagatgggaagaacagggtcagtgtgtataaaataagaaaatcttatgtacccaaataataggatttccaaaggaatatcagcttaaatgctattatgaaattggcctgtgttcctgagtgttttgatgaggagtgttttgatgttccattattatggcatagttgtttgatcttacagtaggaccttttaaaaattgagtccttgtcacatggtaaatgttcttaaatctggtaattttactttatctcaggtatataaagtagtactctctctgtttacacagttcttagatgactagattagtgtttctcattggcatctatcagatatgtttaaagtgccctgtagaaagaaattacatttaaaaagccttcaggactaaggcagcttatttataatggtgggtctcttgcttagtttggattcctcagcgaattgagttttccataagatgactctgaagaggttttgagactgcatttgtgaccagaaccaacgtgagaaaggaagggagttctaggtcacatgctacaaaaccatgaagaataacttctctagacaccttcttccccattgtgtatgttggttttactcctgacgtcataaactctttagtgttagaaggaacataaaaactgtttagaaattaaggagcttgttacaggtcttgccatagaaaggtggtggaactgggttagacccaagttaggaaagcagatgctttttatatgacatgatgctgcttaggccaacattttcagtcttagggaaaaagtcaataaagccccacttcctacccccctagagtagagcataaatatcctcaaaattacaaaaaaagttttctgtcagtatagatttttggttgcagcctacttccaaaaagtagcttaagtgaagaaagaatttattgcaatggaatactgcccttgagcaggttgaagcatcagaaccaagaaatagagagcctgggtgactcctctctccatgccagcctctttgtctttctatggttttcaagtttccatgtctctggggctgcttggatacttctctttgcttctctgcacacctgctttactattacctctctctgcattttgactttcactgttttggcctgcatgtgctgaataaagacatcccttatggtaatctaacctgtctcattcacttttatctcaaattatggaaagagctcagaatgactagaattgctacatcttgttttcaatttcctgaagaaaataaccaacttgccagtgagatgggtgttgtataaggtggtgagcttattcatatgtgtatggaaggaaggaactttttttagagaaaggaagggatggcttgataactaggcgggcagtccaaagagtgtctagtagagaatccttgaagcaaaattgaaaaaaaatttactattttaaggtttcagctccatatgaactccacccaccttctttcagagatggaaaaagcacaaagagtccttgtgacttgagagaacaatttgttggctctggcagagcattatttcacatttacagttagacattaaacatcaggcaaaattttaaggtttctgtgtagcaaactaaaattaagattatctataagctgcttatttatggtacctaaatttaaattataatttttcaacattaaaatatggaaccttcttgcaaggaaatcctgttttaaagtttgggtttttgtttgtttgttttttttttttttaagagatagggtcctgctttgtcacacaggctggagtgcagtggtgtaatcatagctcactgcagccctgacctcctgggctcaagtgatcctctcacctcactcctgagtagctaggactacaagcatgttgccaccatgtcctactaatttttttaccttttttgtagagacgaggtcttactatgttgcccagctggtctcagactcctggcctaaagcaatccttccatcttggctccccaagtgctgggattataggtgtgagcgactgtgcctggccctaaggatcacttttatcaaagtagtcactatgatttactccctgatcatatgtcagaaatatatcactatctgaaaaactaacatattttcttcacaataggttttgcattgttaaaattatcctaactatagttcttttagttcatgaatcatctaaaatttatgtgttactatattcattgtgtttgcctggctattagtgtgcctgtctttgtgcctgtgtgtctgcctgcctgcctttgtgcctccctttgaaattctatttgcctactcacctttctctacctactcagtcagttggttgtctgtgcccaagatttattaatgtgtgttaacgtgtgggtagtagagatagactggaaggtactttgtagtttagaaatgtctgtaatttacacctagttgtttgtaattcatctaatacggtaaatagattatacaaggggacttcaaaaagctcatggaaaaatggaattaagtaaataaatgttatttattaataaatttataaatagattaaaattaaaatataaagttaatttctgaacataaactccatcagtttacttttataagtgatgatacaccaaccattttgtttatccctaagaactgagggtcctagaaatttaaccatttcaatgcagtttttttacattattaactgaagagtaatgaatgccctttaaagatttttttgagattaggaaacaaaacgaaggcagaaggagccaaatcaggactgtaaggtggatgcctaatggcttcccatctgaactctcacaaaattgcccttgtttgatgagaggaatgagcaagaggcatttttgtgggtagaaaaggactctggtgacgctttcttggatgtttttctgctaaagatttggctgactttctcgaaacactctcataataagcagatgttgtctttccttggccctccagaaaaatcaacatgcataatgccttgagcatccccagaaactgttgccatgagctttgctcttgactggtccacttttgccttgactggaccactgccacctcttggtagattgctttgattgactttgtcttcaggatcatactggtaaagccatgtttcatctcctattacagtccttttaagaaatgcttcaggatcttgatcccacttgtttatttatttatttatttattatttttcattttgtttttgagatggagtctcgctctgtcacccaggctggggtgcaggggcatgatctctgctcactgcagtctccgcctcctgggttcaagcgattctccagcctcagcctcccaagtagctgggattacaggtgtgcgccaccacacccagctaatttttgtatttttagtatagacaaggttttgccatgttgtccaggctggtcttggactcctgacctcaggtaatccacccgccttggcctcccaaagtgctgagattacaggcatgacagtttaacatttccattgaaagctctgctcttgtctgtagctatctgggtgcaatcattttggcaccaattgagtggcaatttgttcagctttaatttttcagtcagaattgtgtaagctgagcaacttaagatgtctgtggtgttggctattgtttatgctgttaattgcaggttctcttcagttagggcaagtgacaagatgaatttttttctcaaaaatcaatgtggatggtctgctgctacaggtttcttcaacatcacgttgtcctttcttaaaaagaggcatccatttgtaagctgctgatatttggggcattgtccccataaactttgcttcaccattcttccatccaagctttgccataaatttgatgttttgttcttgcttcagttttttagcagaattcatgttgttctgataggggctcttttcaaactgatatcttatacttcttagtgcttcaaatgagatcctgttcatcagacatgttataagaagttagtatgagtttattttggtgcaaaacaaaattgaaatccatgcatagttttttccatggtacatattttccatgaactttctgaagaccccttgtatgaatgccaaggagaaacatagggtgggtggttattagtaataggattttgcaactgaaataattaaacatgttcagatatttatctccacacccattcactgacattattagatggtgcacaaaagtaaaaagtttattttaaaattactttataatttagatagaagattattaaaattcatttttaagaaacagagtctgtctctgttgctcaagcttgagtgcagtggcacaatcacagctcactgtagcctcaaactcctggactcaacagatccgcctgccttagcctcctaagtagataggactacaggcatgagccactgctccctggtggattacttttaaagtatgtttttttttttttgaaaatgcaacttaaactagaagtacaggatgaatatttaaccaatacatttaatttcttgtcattgctttattagatgctgtttttgtattgtttataaggtctcagcatcatatgtatgatattttcaaatatgttctaaaatgacctcatcatttatttctctagttgttaaagaaggtatagaggttttatcattttttaaaataggatgtaggttggattagatctataaattattattttgcctttaaaacaggttatagataaaagagggaaaggtaatctggtgatactactgggcaggaatctttaaattatttaaagagggtgtaaacgaaggaatgtacaaaagtaaaaataggcagggaagaaaagacctgatggaagtaacatatctttgttaggaatttgagtgtctagcattatagtggacagtccaatgatatggtttacaacagttatataggtattagacctggccattacttactatgtaatgttgagtacatgatttgaaccactctcaatcttagcttctttatcgttaaaacagaaatagtttgtaatgtttgaattagtaagaataaaggacacagtgtcagatgtgtcagaaggaagcatgattagggcattaagtgagaagttaaataaataggaggggaaaaaggccaccccttgctctttttctcttttggacctttttggtgacagagacagaaagaatgtgtatagtatatttaattatctgaaaatacagagctgagcatccctaatctgaagtttaaaatgcccctacatccaaaattttttgagtgccattatggtctgagagcagacattgtgtatgattgctgttttaaatttgttgaggtgtgtttaatggcccagaatttggtctgtcttgttgaatgtttcatgtaaacttgagaagaatgtgtattctgtagttgttgtcttaggtagtctatagacgtgcattatatatccagttgattgatgatgctgttaagttcatctgtgtccttactcatttcctgcttgcttgatctgtccatttctgatagaggagtacggaagtcttcaactataatagtggattcaaatatttctccttgcagttctatcagttttggctcacatatttttatgcacaattgttagacacatatggattaaggattatgctgtcttcttggagaactgacccctttatcatgatgtaaagccaccctatccctgataactttacttgccatgaaatctgctttatctgaaattaataactagtctcattttatttttgtgttagctgatatatttttttccatccatttgcttttaatctgtgtgtgtttgtatatttaaagtggatctcttgtagacagcatatagttaggtcttggtttttaatccactctgacaatcttttaattggtacatttagaccattcacgttcagagtgattactgatagcattggattaatgtctaccatatttgccactattttctgttgtcattgttctttgttcctatttttttttttgtcttccactgtttttctgccttttgcagttttaattcaaaatatcatatgactgtcctttcttagcatgtcagttttacttcttttttttttactttttttgtttttggtcttttctaaagagacaaggtgtcgcttagttgcttaggctggaatgcagtggcatgtcatagctcactgtaacctcaaacttctgggctcacgtgatcctcctgcctcagtctcctgagtagctaggactacaagtgtgtgccaccaaccctcaagtaatgttttttattttttgtagagagaaggtcttaccatgttgcccaggctgtcaaactcctggcctcaagcaatcctcctgccttggcttcccaaagtattgggattataggcatgagccactgtgcccagctgggtgttttcacttttttaagtggttgctctggcatttgcaatgtatatttccagcaaatccaagtccattttcaggtaacactgtaccactttatggatggtgagattactttataatgacaaagtaaccctaattctatcccttgtatcattgctggcattatctcacttacaaataaacatacacacacaagcatatataaccaaatacatgtttgctgctattctgaataaacgtatcagatcaattaataagaaaaataaaagttttaattttactttcatttattctttctctcatttcttcttcctttctttatgtagatgtgaattccagactagaataatttgtcttctctctaaaaaatttattttaacatttctcacaaggtaggtctgtggcaacagattctcttaatcttttctgggggacagggtcttgctctgtctgtcatccaggctataatgcggtggcatgatcatggcacactgcagccttgacctgctgggctcaaccagtccttttgccctagcctccggagtagcagagactacaggcatgcaccgccatactcacttaagtttttttttgtttctgtttttgtagaaacgaggtctcactgtgttgcccaggttggtcttgaactcctgggctcaaaccatccacccacctcagcctcccaaagcattaggactacaggcatgaaccaccttgcccagccttaatttttgtttgttgagaaagtttttatttctctttggtttttgaaggataattttgcaaggttcaggattctaagttggtgggttttttcttctcaatatgatattttgtcactctcttcttgcttgcctagtttctgaaacagagtcagatgtaattcttattatacttgctcctctttaggtaagatgattttttttcctctggctttttaaacgatttgtttatcttttttttttttttgtagtttgaaagtgatatgcctacataagttatttctggcatttattctgatcagtgttctctgagctgcttggatctgtggtttggtttctgacattaatttggggaaattttcaatcattatttcaaatatttcttctgttcccttcttctctttctgttattacccttatgcatatttacatctcttgtagttgtccccacagtttttgcatattccattctgttgtttcagtttttttctagtctttttaatctcttttcagttttggaagcttttattgagatatcctcaagttgagagattctttcctcagccatgtctagtctactagtaagcccaccaacaacattcttcatttttgttacagttttttaaaaaaatctctagcgtttcttaggccgggcacggtggctcacgcctgtaatcccaggactttgggaggcagaggtgggtggatcgtgaggtcatgagatcgagaccatcctggctaacacggtgaaaccccatctctactaaaaatacaaaaaaattagctgggcgtggtggtgggcgcctgtagtcccagctactggggaggctgaggcaggagaatgtcgtgaacccaggaggcggagcttgcagtgagccgagatcacaccattgcactccagcctgggcgacagggcgagactccgtctcaaaaaaaaaaaatctctagtgtttctttttggttatttctttgaatttctgtctctttgcttatattgattgcccatctattctggcatactgtctactttatctgttagagttcttaggatattaatcatagggtgtttgtttgtttgtttgtttgtttgtgtgaaacagggttttgctttgtctcccaggctggagtgcagtgatacaatcatagctaactgcaacctccgcctcctgggctcaagcaatcctcccacctcagcctccccagtagctgggatcacaggcatgtgtgaacatgcctggctaagttttcatatttttttgtagagaaggggtttcgtcatgttgcccaggctggtctcgaactcctgggctgaagagacctgcctacctctgcctcccaaagtgctgggattacaggcatgagccacccagagccaaggtctcagtcttttagtgagcttgtttatggattttgaactatatcctgtttctcagcgcctcacccccaggatggcttgaatgacctgtagttgggtatttcccttacctcatgtaaataaggctctgttaaaaccccagcaggttaggctcaggttaaatcatttctccgcagggcagaccttgttaagaagaatggaatattcggccaggcacagtggctcacacctgtaatcccagcactttgggaggctgaggctggtggatcacaaggtcaagagatagagaccatcctggccaacatggtgaaaccccgtctctaataaaaattagctgagtgttcctgtagtcccagctactcgggaggctgaggcaggagaatcacttgaacccgggaggtggaggttgcagtgatccgagaccgcaccactgcactccagcctggtgacagagcaagactccatctcaaaaataaaaaataaaaatacaaaaaaagggattttctctaatacttactatgagaacctggtagagctcctggaggtaaaacaaaaatgtggggtcccctttggattgggtacaccaggagtttttgtttgtttgtttgtttttgtttgttttttttttagagcggtctcgctgttgtccaggctggagtgcaacggcacagccttggcacactgcagcctcaacctcgtggcctcatgtgatcctcccacctcagcctccctagtagctgggactacagatgtatgcaaccacacttatctatttttaaattttttgtagaggtggggtctcactgtgtttgcctaggctggtctcgaacccctgggctcaagaggtcctcccgcttccacctcccagagtacttggattacaagtatgagccactgcatccagcctcccctggagattttaaccctcatagttgttcacactgagcctctagcagttcatcaattacagttcaggtttcttatggaagtttgctgtgtgagtgtttctgctctgattactcgtgattctccgtattcaccttctgtctctccagtttgggggcagctgtttgacctgtgacttaacttctcttacagatctaagaaaagttgttgatttttcagtttgtttagctttttacttgctcttaagattgagtgacagatttttttttgcatttttttattgtgataaaatgtattaatacaaaacatttatcatttaagtgtacagttctgtggcattagatacattcacactgtgcaattaggactcttaaaaggaaaaagtcacatactgttagaagggtcatacaaggctttatagaaaggatttttaagatgagcttctatatatcaattaaaagaacatttcagtagaaacatgggcgtatggtatgataattaccagaagacaaatgcaaataagtgctgaacacaggaaaaaaataatcaacctctccaataatcagaaaaattgaagttaatcatcattaactgttgggggagtagctaccaaatttgataaaaactcaaaaattcgtaataattcagaaattgagaatagcggccgggcgtggtggctcacacctgtaattctagcactttgggaggctgaggcgggcagatcacgtgagctcagaagttcgagaccagcctggccaacatggcgaaaccccatctctactaaaaatagaaaaattagctgggcctggtggtgggcgcgtgtaatcccagctattcgggaggctgaggcaggagaatcgcttgaacccatgaggtggaggttgcagtcagccaagatcacgccactgcactccagcctgggcaatagagcaagactccatctcaaaaaaaaaaaaaaaaagaaaaagaaaaaagaaagaaaaagaaaatggtaaggatatagaaaactagtgtttctaggtccattaaggggagggtaaactggtgaagcctgttttggaaggcagtttggccacttctaatagaattgataaatgtacatactctttgatccagcatgtcaactttagggatctttccgtaaaaatacttgcatatgtgcataaaatagtatgtccaagtatgcaacaatttttgtgaaacaacctaaaatagctattagtaaggagactttgcataactggttacctaaaaggaaacagatgtggaggggagagagtttggctttttcattttatacctgtatgcagaaaagagtaacatagcaggcctaagactactatccttagaaaggcctgcttacaatgttatcccttggctggtgtctgggaacttagacttttgggagaatttccattatcccctgataagagtggttcactgtgcccaaactgtacaaacaatgtggtttatgagctgggcccagtggctcaattgtgtaatctcagtgctttgggaggccgaggcaggaggattccttgaggccagcttgggccacatagtaagacctcatctctacaaaacatttttaaaaattagccagatgtcatggtgtgcacctgtgtagtcttagctactttgggaagctgaggcaggcagataacttgagtccagtagttcaaagttgcagtgagccttaatcatgccactgcactccagcatgggtagcagaacaagactctctctctgaaaaacaaaaataaaaaataatatggtttatgttgaacatctactttttttctgggagtctggaattttggtatattcttaggcagagtgcctgtgtaaccagcctccaataaaagccttgggcactttatttctaatgcgcttcccttgtggacaacgtttcacacatgttgtcacaacttatttctgcaggaattagaggatcgtgtgtaatttcattagaagaggatttttgaaagcttgtgcctagtttcttctggactttgcctcttgtgcctttttctttgctgcttttactttgtatcttttagctgtgataaattatagctctgagtatggttatattcagtgatatgttggatcagttgatatgctgagttttttacatgtgtgtattatctaacccctttattgtgcacattttcccttgatggtaaaacagtgaaagctttccttggtaacattgtaggtgatataataaagaagtgaatcaaaaagtgagtgtctttaggtatgttatttaggacaaggagatactactttaggtaaattattttaaattacacttccagtttttattaccttcatatgtcaataggatgctaaaccacagatgttaaatttcaaatagcattttaagttttgctctctagttttataaatcatattacataaacttactgaactaaatgtgaaaatagggtgccaattcactgactatgtgatgttccgaatgggttatcaatgtctattacgtctagcagacttgccctgctttgttgaatgtgtatttggaagacactaggctctgtgggggaagaaaaagaaataggttattatctgtgaggcagtgaattataatcttgggtgatggcggcattggtagtgatgggataaaatgtgtaaacatgatggatattaaaggcaagaatgacaagtactatatgactaggacatgtttttggaatatatgcctcattagagcagggattttgtcctgttcatctcttatcactagcacctaaaacagtccctgggcataggataggttaggtggagttaatgtgaagccagtcgtcgtcataaaagtgataattgagtttgaagaggaagttctttttattataaatctctgaatccagtatgtcagcaaacttaaaaatattttttgggaatatcataacagttaattcatgaataggtcagaactttctaatgttgtatgaatattatgtgacctggtaatctgagacactttaatggcgcttgcctgcaactagctgttctttttgatactggataggacatttaattctgtacaaacaactactaagggtttctttcccttaaaaaattttttttaattgtggtaaaatacatgtaacatgaaaacctatcatctaagccatttttaaatgtacagttcaatagcgttaagtacattcacattgttgtataaccaatctctagaactcttctcatcttagaaagctaaaactctgttcccattaaaccaccctctttattccaaactcattctcctccttcctccaacctgtagcaccattctattacactttctgtctgtatggatttgacaattctaggtgcctcatataattaggattataaaatattgtctttttgtgactggtgtatttcagttagcataatgtcctcagggttcatccatgttgtagtatgtgtcaaaatcttcctttttaaagggttgaaaaatactgcattgtatgtatatactacattttgtttatctatttgcccatagcatgacacttaggttgcttccaccttttggctattgtgaatgctcctgctgtgaacatggttgtacaaatatctgttcgagaccctgctttccgttctttggggtatatacccaaaaatggaattgctgaatgatatgataattctacttttactttttgaggaaccaccgtactgtttcctatagtaactgtatcattttacatttcacaacagagcacaagggttccagtttctccatatccttgccaatacctgttattctggcttgttttgttttgttttttgttttttgttttttatagagttgaggttttgctgtgttgcccagactggtcttgaactcctcaagtggcacaagcgatcctcctgccttggcctcccaaagtgcttgggttatagttatgagccactgtgcccagcctattttggttttttgatagtagccatcacaatggttcgagtggattgctaagtcatacagggatgtaaaattgtgtctgttgaatcatctatatgaaatacttcataggaattgaagctattaagattttgatgcctgttggagattattggtgacttgctaaaagtaattttagtagggtaataaagggaaaaatgaaattttcagagggtgtaggagttagtggttcaccaggaagtgtagtttctctttagaaagtttggtcagctgaccacagcactgtggcagtctccggccttgcaaaaataacttttttccatatagtggtcaataagtattgaggtctcttaaactacacaagtgactcttcctgtgctatatttgtttttgcagagagaagtgtgaattctgaatctctgctactaatttgggagtctttgttttatatttgtaatcggaggtaaagagaattgatgtaattgtggcttaatatgttaatactagaacttaatattctcaattttactgtatgtttttaattaattaattaattaattttatttatttatttatttatttttgagacagagtcttgctctgtcgcccaggctggaatgcagtggcacgatctcggctcactgcaagctccgcctcctgggttcatgccattctcctgcctcagcctcccaagtagctgggactacaagtgcccatcaccacgcccaactaatttttgtatttttagtagagacggggtttcaccgtgttagccaggatggtctcggtctcctgacctcatgatctgcccgcctcggcctaccaaagtgtatttatttattttttgagacagagtctcactctgttgcccaggctggagtgcagtggtgcagtctcggctcactgcaacctctgcctcctgggttcaagcgattctcctgccccagcctcccgagtagctggcattacaggcgcatgccaccacgcccagctaatttttgtattttttagtagagatggggtttcaccaccttggccaagctggtctcaaactcccaacctcaggtgatccacccacctcggccccaaagtgctgggattacaggagtgagccactgcttccggcctgctgtatgtttttattatatactatgagataatgagattagtgatggattgctttgtaatactttgggagtctgggtttggcagagtgtgcccctatgaagactaagtgggactataatgattgtgttttcttaaatcagaatcaggatgcataaccagatgaaggaagacatagtcgggagccatagttttaatatctagattttggaattttagggtgatttactatagggacaaagtatttgaaattgggattggcggaacatcagtggaaccagcgattgctaagttaaatatatacagggacattagataatggatgatgaggaaatgggtaaaagaaagtgagggccttgtgagttgaaacaaaaataatcaaacctggaacactttccatttattgtattagatatcttcatttcaataaaattaatgtatatgacaaaattttattgtcctcctagttcaagtggtattctacttttatttccataaaaatatactttcaggatagggaaagggtaaacttgcattataagtttgtattttctcacgaagggacaggagagaagaaaaaaatcatttgcttattgtctaggctatgcaaaaaaaaaaaaaaagaacagccttgtttttttattacattttttcatttagtttatgatttgccatatttattattttaaaacatgaagtctgtagtacaaggttttatttaaaaacattctcaaaatcaaggactattactacatgcattcagggaagattatctagctatattggagagatctccttcgctagtaattgatgaaacctaggaattgaaccccagcttctctgacttaaagctgccctattgtgaagtagaaatgaagtgtaagcaatatattcttaagtatactggtcaattctgatttacatagaagacctaacagtttatttactccctactatttgttatgggattatgctgatagtagctattactaatagaagatacggtctaaatcagggaattcgtgttctatcagggatggcatatgtgcatatctaaataattactgtacactgggatatgttctagataagaggtgtatataaagtagatagagatgaggaagtggatgatgggcctgtatgccagtactactatcaggaaaaatttcatgaagatgatttctgtattgggctagtaaaaagcagggagtttcttggcagacaattaggggaataagtgaagcatacattttgacatgagcaaagcacagaatcattttattactccaagactcataagactggccctgtttacttcaaagttactttctttattatcaatcctgagttggcttcaaatgaggaggcatagccatgcatttctgaaaaaaaagggagagaattagtctgttaggcagcagtgggtgaacagtgagcaaagataggaagatgaattttgataggcagagttgcatattttgcaactaaaggtagacattgcagttgtatagttgaaagaccctttggttattttagctgcttataaccattatcgttagtgatgtgcattttttctttttttttgagatggagctctgtcgcccaggctggagtgcagtggtgtgatctcggctcactgcaacctcagcctcctgagtagctgggactacgggcacacaccacgaggcttggctaatttttgtattttttggtagagattgggtttcaccatgttggccaggctggtcttgagctcctgacctcaagtgatctgcccaccttggcctcctaaagtgctgggattacaggcacaagccaccgtgcccagcccatatacatatttttatgtaagtatgtttgtaaagttagagataaaatagtgataatacagtgttactttgagatagtatagtgttactttggctggtactctaattttactgtatgctgctattaatttatatttggggttttaagaaattttggtttggttatcatgcagtttgtagggttaaattaatactattaagatggtgtggtttttcttactgaggacagttaaaattttcaaatataaagccagatgaatttatttatttaacaatggttattgaatgtgaactatgtcccaaacctgctaccgtttaaaattcagatgaattctccagtaattgcctcagaaattttccggagcaattaggtaaaaggagtatgattttatgggttaggtagccttaatattttgccacagtataactcttaagcttaaagtaatttccatttttatttactatacaaagtatagttttaatatttgtatattcttatatgcatatttactaaaagttgtgccttatgaaactcatactgtgttttgttgttgttttttgttgtcgtgttttttttttttttttttttttttttttttgagacggaatctcgcccttgtgccaggctggagtgcagtggcacgatctcagctcactgcaacctccgccttactggtttaagtgattctcctacctcagccttccgagtagcttggattacaggcatgcgccaccatgcccagctaatttttgtatttttagtagagatggggtttcaccatgttggccaggatggtctcgatctcctgacttcgtgatctaccagccttggcctcccaaagtgctgggattagaggcatgagccaccgcacccagctgaaactcgtactgtgttttaagtgttataacattgaggaatttgaggcagtggtgtgtggtctaataacagagcatgagagagcttcagctttgatacttaatttctatatatcccatcttattccgaaaggaatttcagttagcttaatttccattttagtgctgtttctttttgtgttaatttattgttttcttaattgtgctgatttaaaatccagccaacaaattaatttaacgcttgtctgtctaaatgtattttcacttcaaagtctcttcagtgaatatgaagacaattagctatatttttgctaacaagatttgctgatggggagaagagcgagataaaggaacaaatcaaggatgagtgttaggtttttggcttgaactactgttgaatggtggtggtttttggcttgaactgctgttgaatggtggtgctatttgggcatgtttgtgatgcccattacacatccagtggacaggccaatagacagctctttgactctggagagatttaacaaactttaaacattctcaggagcttagatgaacaatgaactgttccactcttttaagaacttgaatcttgacacacaagtgggtatcttaaagtcacattgcatgtgattttggaggcttttgagaatccatttattgatttaggattaggggaatacaaatttagtgttttaggaaattgtttaaagcaaagtgaatattaaactcgaattttgtttgtatcaaaaattctaagtattaaaaatgtttctctgacttgtctgagaaggctcagtaaataattcttcaatttgtaatgagagttttgctttgcattagctattggtctataaagtccagtaagatagtctaatctctgccttcagttttatagattagtggacgagacagacaagtactgaaatacttaagaaatacttttcacaagtggcaatagaacaatgtgttatggactcattgcagaaggctgaggagcagtaaaggagggaaggttcaagaaagccttcaaaaaggaaataacactttagccagagccctgctcaccagtaagagcaaaaattgtgcaactttgatatttaagaaatggagggttactgctagtcgtagtggtggtgagtaattctatatgactaaagcatcaaactctaataagagcattataaaaagaggctagaaaattggacaggcaacattcaacatatcttataattaaagatttggtagtttatgttagaggtgatagacacataggagagtttttaaatgtgggagtaaaatggtcagacttgactttttagaacagtaataaaggagtgcagttatttttggaattcatttatgtgactttttaaagacttctggggtaggctggtgcagtggcttatggctgtaatcccatcactttgggaggctaaggtgggcagatggcttcagtccaggagttcgagaccagcctggacaacgtggcgaaaccccatctctacaaaaaatacaattagccaggcgtggcggtgcgtgcctatagtcccagctactcgctaagggacgctgaggtgggagaatcacctgagcccaggagtttaagactgcagtgagctgtgattgcaccactgcattccagcctgggcaacagagtgagtccctgtctcaataaagatctttagggtagacttaattgcaaatgctttcttaaaggatttgtttgttttcttagcttttttttaaaaagtcacacgataaagggtgtggtgggtacctataacttaatacggacatcatttagctatatttttgcccagttaatacagtaaatgattaaaaattctttcttgctttaggattatatgaaataattaaattatataataaatgaattattttattaatgtttagtgctattctcatacagtctatgaataaggtttcttagtatattatgtttctcaataatacagaatttttttgtttctttcttagtaatagcttcatcagagacaatagaatagtggtcgggaagttaaaatgaaattatatgtgtagataattctgtttcatagagtttaaatgaactttggtgctacttctattcaggaactatttagacattaatgttgatgtgttaaaaaaaaaaaaaaacctgctctaggccaaatcagatcttaatctggtggtaattttgtacccacagagtttattgtttaacagggcaaattagatgtattctctttatatatttatcataagagtaagaaatgtaagtgttctaaaagtacatataaaggtaaaacaattcagaggggaagattatgtctggaggaagggcatcagaaactctgtaggagctagggcttaaaattaaaagataagtaagctttggaggtgtgcaagtggggagaccaccaacaagcaaagaaaaagcatacacaaagacacagaaaaatgattatcatgggattttttttaaagtagaatcttagcaacttttaaaaagacaaattatcaggcaattaccacctcagacctactgaatcagaaactactgggatgaggcccagcaatgtggccctccaggtgattctgaagcacactcaaatttgacaaactgctttgcaatttcaggcagataaattgacctggaatatgcaactctttctgatctttgatctaggaaaggttttaaagaaataaatctgaagtaacaacatttaaagagttccagtaattagttcaataataatagttaacatttattgagccattttatgtactagaccttttgctgagtaaaggttattatctcagttttatagatgagacacagagaggttaaatatgttaattgtcacacagctaagaaagtaccagatccagaattttaatttatgtagcttactataaagctgacatttttcggtgggaaataagttccaacttgtagatacctttttaaagtacaaaacaaagtttttacttgttttatggaccacttttgtatctctgatgggcatgaaaattgctaagaacactattgtagatttttattttaatagagcattctccattttaaactttaattatagaaagcattttaagaaatggcatgctaggctttaagaaaactggataaatgaaaatccaaacttaaataagataaatatttggacgcaaaagttctcaaggttcattatgagaaatgtagtcatttcacataaaagctttgttttgcacatttctcaataacgtaatttgtcatgtaaaagaagaaaagtctggagtgggccaggcatggtggcttacacttgtattccccagcactttggaatgttgaggcaggaggattgctggagcccaggagttcgagaccagcctccgcaacatacatggggagaccccagccctacaaaaaatagtaataataattagctgggcatggtgacatgagcctgtggttccagccactttggaggctgaggcaggaggatcatttgaacatgggagtttgaagctatggtgagccatgatcatgccactgcattccagtttagacaacagagtgagactccgtctgtgaatgagtgaatgaatgaatgaaaaagaaaaagcttagagtgattgtaccaggcattcctgaggtacattcacattttataattaaactcaaccactctttgtactaaattttttctcgctgacattgacctaagatatattcctttcccctctgtgtttctgcaactatttaagttgatatccttctctaagtcagattcaaaataatattttgaaatgcactgatactataagtatctaaaaatacatcttttcagatgcttaatctttgagcagagaaaatacaaacattctaattaaatgtgcaagatgcgtatataagtaaccatgaggatctttgttaatatggagtaacgacatcataaacaatcttttctactgtccttttttatttacgttcaattttttgaacaggcaatacagtcatacaatccaaaagatatgaaaagacataatagtaatgtctcattctcatccgtttcccttaggtacccatttcccttccccacagacacatactttgttaatagtttttcttccagagatgatatatgcatatgtacaagcaaatgcaaatgtttttatttctttttaacaccagtagtaatatattacatatatacatactgcactgtgtatataatgtacactattgtttcctgctttttacatttatacttaatatgtatttttcagatactgtcatcttactatatataaaaagctaactcatttgtttttcagctctctcatatttgatggtatgaataaaacaaatttagccagttttgtattaagaggtttctttgattgtagttttttgctgttactaacaatgctgcagtggttgggcgcgtggctcacacctgtaatctcagcactttggaaggctgaggcgggtggatcacctaaggtcaggagttcaagaccagcctggataacatagtgaaacgctgtctctactaaaaatatgaaaattagctggacctggtggcacgcatctgtaattccagctactcaggaggctgaggcacaagaattgcttgaacctgggaagccgaggttgcagtgggccgagatcgcaccactgcactccagcctgggcaacagagtgagatcctgtctcaaaacaaacaaacaaagtgctgtggtatgtaactttgaatataaatcatttcatgtgtgtcccatttttatctggaggacaaagttgtagaagtacaattcagagacagggtcttgcattgttaagcaggctggtcttgaactcctggcttcaagcagtcctcccaaagtgctaggattacaagtgtgagccaccatgctcggcccccacttgcttttgaatacagtttttcctctgacacatgtatatatttggagaactctattaccacaggaaatcacaagaaatagcatcataaatgtggggaattttactttgacattgtgccagtgcagaataagattctagtaaatctttatcataaagaaaaaaatgtattcctgttgtaggtctctagtattgtgatgataaaatttagtcgtttttcaaagaaaaagaaaggtttataggcagttttagttccttaaatatcagtatcacaagtagcaaaaattaatgagaaagttaaattttatcagatttatttttcattttatttgtatttaataatttgttgaatggtaaaaccagaatgctttcaatatgtcttgaggcctgaaagaaagttcctttgaaattaaatttcagcaatgtagttgtgtagaatttgaacaattcacaatactgactttcagtgcttctgaaagcaggaagtgtattactgacacgcagaaatattccagcccaaagaacatccctactgccatatgtggtaagaatttgtcactaacccacaaactagttctgtaatgcagtgaataagcagaattggtctttgttggacatttccaattcaatatgaaagaactttgttttgcagtgtcttgtaagtaattattagcttatgccttgggagaaagcctggcacatcatgggtgcgtgctcatggtttattgagagaagaaaattcttttaggcatgtttttaaaacttggttattgtgacccttagttaaaacactgaaattactcgaatatgttaaagactgagttaaatattctgactcagcttattaatgatatctttaaattatattacttttattctgttttccctctttgctgctcatgtgaaataaatatgaatcttatgtttgcacttatgctataaaagaaattatccttggggttaattattaagggatggggaaattaagagctaagagacaggaaaatgagttgtgaggaattggggtcaccagatttcattaaaaatttgaaaatatcactgtttctctaaactttaatttttatttgttgtattttaagcggttaagaagattgtctaccaaatatagaacagaaaagatatatcccacagccactggagaaaaagaagaaaatgttaaaaagaacagatacaaggacatactgccatgtaagttggaaatgcccttgataaaatacatagaaatgctaattagccttttgtaacctaactagttttattcttcctgagtttcactgttaaggaagtagtaattaacctatctttcaaagtacatggaaagataataattcataattgtgctttttgtttttccttctgatcctaatttttgtttaatttttttcctgtaagtatcacagttgctctaatactaaattacttttaaatactgtaaatccaagtgaaaatatcttctgtcaactctctgttcaaagatgttatttcattaaaataatagacaactgaatacattttataaaatgctaacaatgttgatttttcatatatctatacataagaaccttaattgattaattatgcatgagaaaatgaagcataggatgactcaaacatctgtgtgtctactattctcagcagtctgaatatgtgcctctaagtatatgtcttagactgattgcattacattctaatgatattttatttatttatttatttatttatttgtttgtttgtttgtttagaggtgggggttctcactgtgttccccaggctggtctcaaactcctgagctcatacgatcctcccacctcagcctccccaagtgttgtgattacaggtgtgagccactgcgccctgtctgtattcttaaatagcacagttttctggcaagataactttaactctgaaagtatacttaaggtgtgccatcactttatccagtaaaagctatacgtcatacttgctatcttttaaagctgccgtcgtttttctttcttcataagtattttgaaatatctacattccatcacatcatttcctcaattcttattcagtcttaaaggttgttctctctaaaatgcctttaaagttcttggtgacttttttttttttttttgtgacagtcttgctctgtagcccaggctggagtgcggtggtgggatcttggctcactgcaacctctgcctcccaggttcaagcgactcttgtaccttagcctcctgagagctgggacagctctaatacaggtgcctgccaccatacccagctaattttttgtattttagtagagacagggtttcaccatgttgcccagggcccagtggctttttaattgccagatttggtggtctttttttactgtttattctaacaggaagaatattgattattcaagaatgttgaactattttgatgccattgatcaatccctatttttgaaattttcttcttccatgataactcttttaaaacacctcttccctctcatctctttccctcttttctccactaacttctttgcctcaatttaatccttcatccttttgttgttctacattattatcagctgtgggatatgtggatagcctgtgttggcagaattaacaagtggcaacataacataatggtatagtgttctgattctggaagttgaaatcctgactccaccagttgctagctatatgaccttggactgatcctctctgtgccttggttttgtcatccttaaaatggagattataataatactttttaggattatttgcacaataggttaatattaaatgcttaaaagtgtacccagtggccaggcgcggtggctcacgcctataatcccagcactttgggaggccgagactggtggatcacgaggtcaggagttcgcgaccagcctgaccaacatggtgaaaccccatctctatcaaaaatacaaaaattagccagatgtggtggcacgtgcctgtaattccagctactcaggaggctgaggcaggagaattgcctgaacccaggaggtggaggttgccatgagccgagattgcgccattgcattccagcctgggcgacagagtaagactctatctcaaaaaaaaaaaaaacaaaaaaacaaaaaaaaccagtgtacctagcacatagtaaccaatcattaagcttttgcaaaataaccagtatacctagcacatagtaaccaatcattaagcttttgcaaaatacactccacttttctcacctgttgtcttagtctgttcaggctattacagaaataccataaacagggttgcttattaataacagacatttgtatcttcaaattctagagactgggaagtccaagatgaaggcaccagcagatatgctgtctagtgaagggtcactctggctcatagatggtgccttctcactgcacttcacatggtggaaggggcaaacaagctctctcgggcctctttagtaaaagctggtaatcccattcacaaggcataatctaatcatctcctaaaggccctaccacttaatactgttgcattggaatttatgttttaacttatgaatttgggaaggacacaaatattcagaccatagcaccagtctgcctcagaataggggatgacatggctttctggatacttcgtattaagcaagataattttaaggtgatcctacattgctctggaattattcatgcacacattcaaagagttagcctgtccactttctttttctgtcgtctagccgtaggtttctcttttcatatgatgtttcattttcttctttgtttttgaaacggtgtcttgctctgttgcccaggctggagtgcagtggtgcgatctccgcacactataacctctgcctaccagcttcaagctattttcctgcctcagcctcccaagtagctgggattacaggcacccgctgccacatccggctaatttttgtattgttagtagagacgtggtttcaccatgttggccaggctgctctcgaactcctaacgtcaggtcatccgcctcccttggcatttactcattttacagaaagcttctgagggtgtactgtatgctgggaatgcaacaaaaaacaaactggcaaaaatccctgcccttgtggagcttatatgttagtcaaggtgatggacgatacatattaacatatatggtctgtcatgtggtggtaattagtgttattgagagtgtggttcgaatgagggatagggagaaagcagagaatagaagggtaagtttacagttttggctggggtagtgggaaaggttagtggtgtagtgttaaactggtcctctgaaagttctgatttgtattgtttgctgatttctgtgataaatggattatttaccataatcatcacagcaaaactctgaggtaagtactgttatgtgccattttgcaaacaggaaactgagacagagaggttaaaaagcttgtcacacagttaaatattgtggggtaagaatttaaacacaggcggttttaaagccttcactagggtgattttgcctctcaagggacacttagcaatgtctggagagatttggttgtcacaactggggtacgggagtggacaggctgctaatggcatctaacaagtagaggctaggaatactgctacacatcctgcagtgcataggatgcagcccccttccccaaacaaagacttctcgccaaaatatatgagtgtcagcgttgagagaccttgtccaagagcttgagttcttaattactgtgcagtaatcagattgacagtgccttttttcctttaagttatttaaagtttgataagtaggtctccagtaaatttctagttattttgacttgggatttttttttcttttttttgagacagaatctcactcttgtcgccctggctggagtgcagtgtgggatctcggctcactgcaacctctatctcccgggtttaagcaattctcgtgcctcagcctcccaagtagctgggattacaagcacctgccaccatgcccagctaattttttggtatttttagtagagacagggtttcaccatgtcggccaggctggtctcaaactcctgacctcaggtgatccacccgcttcagcctcccaaagtactaggattactggtgtgagccactgcacctggcctggaaatttatattgaaagtaattgtactgagagatatgtgcttatttactgttagataactatttaattcattgcccgggcacagtggctcatgcatgtaatcccagcactttaggaggccaagctgggcagattatttgagctcaggagttcaagaccagcctgggcaacatagcaaaactcaacacacacacgcacgcacgcacgcacacacacatactctctctttctctctctcgtgtgtacacttgtggtcccagctactcagtaggctgatgtgggaggatcacttgagaccaggaggtcaaggctgcagtgaactatgattgcaccactgcactccagcctgggtaacagagcgagactgtctcaaaaaataagatggagaagaatttaattcactaacttcctttgcatgttttaacatgtgcagtgcttgcagaaatagaatttttaaaacaggtttgaggtataatttacatacccatgaaatttatccattttaattgtgcaattcaatgatttttttaaagtaaatttatagagttttgcaacaattaatacaatctagttttaggacatttccatcacccctaaaagatctgagtcttcagccctgggcagctgttaatcagctttctgtctgtatagattttccttttctgtgaatttaatataaatgtaatcatacaatatatagtcttttgtgtctagctcttttaacagtttttttttgagatgaagtctcattctgttgcccaggctggagtgcagtggcatgatctcggctcactgcgacctccgcctcccaggttcatgagattctcctgtctcagcctcctgagtagctgggattataggcgcacatcaccatgcctggctaattttttgtgttatttttagtagatacagggtttcactatgttggccagactggtctcgaactcctgacctcgtgatccgcctgcctcggcctcccaaagtgctgggattacaggcttgagccactgtgcccagcctcttgttaacacattttaaagattcattcacgatgtagcatgcatcgatagttcattcctttttgttgttgaataatattccattgtatgaatgatgaacatattgaataatgctgctatgaacatgtcatacaactctctgtgtggacctatggttttgtttctcttggttggatagctagcaaaaccatggagaggaataattgttttcatttttttgatatttagattatttctaaatatgcttaataagagcaccaatctggcagggcgaggtgactcatgtctgtaatcccaggactttgggaggccgaagcgggcagatcacttgagatcagatcaagaccagcctggccaatacggtgaaaccccgcctctactaaaaatacaaaaattagctaggcatgatggcacgtgcctgtagtcccagctacttgagaggctgaggcacgagaatcacttgaacctgggaggcagaggttgcagtgagccaagatggtgccactgcactccaacctgggtgacagagccagacactgtctcaaaaaaaaaagagcaccaatgaagaatattaaaacagccacccaagttctttctcgctacttctagttcccggcgctttgccgggtgttaatggtggcccaaaatcatgggtgctgtggctttctccctaaggtgtcacaggagctaagggtgccacttaacaaactgcagaagatgcaggcaggtgaaggacacccagtctgctgtggcagtggaatgtggcagaaaagccagctgggagggcggggagcaatcctggaaggcctggctgaccccacaattgaacagggtttggtgtgtcattgcttttaggccttttcagtggacagaactggggtggatatacactcatttatttgaaatcatgcatttgttccatactccaattccagcccaccccttctttgctctatggtcaagtgagtgagaacaggcggctacattttcagccttgttgctcaccgcttccttccagtagtcccatgttgcttcatatctcttcagtacatgtattatttagacccagagccttggcttttaaatcaggcagccccagtttcaaatgtgtcactgccatctcagttttgtgatttgggcatacctctgtctgtgcatagcgatattaacttctatctccatgggtgtgtggtgaggataaaattatgtgcttagaggaaacgttcattccatggtagctattttttattaattctatacttttgaacctattatgctacctataatgccctattttttttttctttttaatcattggcaaacttctcattccctgagacccagcttgtcacacctctgaagactgctgatatcctcaagatgttccttactccctttccttgctactactttactatggatatatgaacaacattattgtgcttattacatgcaataaatatttattggatgaatgatactaaaattcacatttaaaatgccaaaatcaaaatacacatgatatgctgtataagtagcataatgttgatttttaaatctaatgtgctgtgggtacatagtagaaagcagtgactaccaaatttgcctgtgttttagaatttaaatggggagttttaaaaagggtatttctgtgccccatttttaatttactgaattgaacttactacaagatgtagtactccagaaatcttggattttaatttgctttccccagctgttgaatgattggggatagatgaaataagattggcaaaatgttgataatgaagctgggtaatggatatacaaagattcattatactgttctattttggtgtatgcttaaaattttccatcttagaaaattttttaaaaaaagaaattaccagcctgcatgtagccagcctggcaccagtcctaactatcatttgggagccactattctcatttggatttacagtcaccagaaactttactgaggacccagtggtaaaccagctattgtattctgcctttgagatactttgaatagaggctaatatgtcatatgaataagggtaattaactgagaccccttattactggcaaacatggtaagaggaagcttcctgtagttattcagccatcattatcctaaccactgaatattctattctcattttccagagtcatagcttttttttgtatgtgtatttcctatcccaaatggcatataaaaagggggatgggacatgtagggtggcgtgaaataaatgacagagcattgacaaacatattttaaacattctgtttcttagaatacagtgaggagatgaataattttcaccagaagcaagtatatcttccttatatgtgtcttctacaaatttctaaagaagacttttttaaaagtaaatttatcaattaaattagcagaactgggcctttagtgctatgtataaaatttgagccaatgaaaaataaattagttactattagttgttctttaatactttgctaagaagtttattcatgtctgttaacatttccgtatttccttttgtatttttactgcctttgatactcattcatggattagaagggattataatttgataataataatggcattttacatgttatatgttatggtcccttctaatccagaaacaatgaatactaggcaattctactttaggatttcataatctgaaagcgtctaacctcaaatacttactaactataaaagggaaaggcagtaactttcccttttggtaaccaagcaataccatattaaccaagtgaccaaggttaacatcacaagtactaaagcatatgtatatcatgtatcctctgatgtgttgtgctgagaaggacacaatatcgttctgtggtattaccaaaaattcataacttcgttccagtcatttaaaaaaaatcaatcagagaaacttttttagattgaaggagactaaggagaaataaaaattattattattattatcttgagatggagtcccactctgtcacccaggctggagtgcagtggcgcgatctcggcttaccacaacctccgcttcctgggttcaagtgattctcctgcctcagcctcccgagtagctgagattacaggcatgcgccacgatgccctgccaattttttttgtatttttagtagagatggggtttcgccatgtgggccaggctggtctcaaactcttaacctcatgtgatccgcccaccttggcctcccaaaatgctgggattacaggggtgagccactatgcctggccactaaaaattaaatttaatatgagatcctcgaaagagaaaaaagattagaaaacactgacttgtatagtcttgtttaattaatagttttataagtgttaattttgtggtattattgatcattgtcttatggttatataagatgttactattagaggaagttcagtgagaggcatgggaattctctgtactatttttacagtttttctataaatctaaaattagttctaaataaaaagttttaaacatcagcacaaactggaaaaaactatttgcacttcctgtgacagagggctgattttttctttttacatagatctcataaaaatcagtaggacaaaacagacgtggaaaaatgggcaaaggatataaacaagtggtttatggaaaaagaagtacacagaaccaataaatagattaaaacatacaatcctttgcataattcaagaaatggaaattaaaacaagatatttttactttttggtttgtcagtgatgaaaagtttggtaatacccagtcacccttattacataaccctgtataaattgtttcataccttttagaaggcaagtagcaattcctctgttaggaatttaccctacagcaatgctggtaacagctatatatacattagtgttcattgtagtaatgtttttaataggaaaaaaatggcccatcagtagagtagctaaataaagaatgaaacattcacatgatggaattctctgttacactaaaaagagtgagatagcctagtgcaagctgagtgcaatggttcacacctgtaatccaaacacttgggagcctgagccaggaagatctgtagtccaggagttttaggttcgaatgagctatgattgcagcactgcacttcagcctgagtgacagagtgagaccttgtctctgtattttaaaataatagtaaaaataataaagtaaatctttctgtgctttgggaagagttccaggatatactataaactgaaaagtaatgatacagaacagcatgtataggatgcttgcatttgtgtagtagtttttcaaagtatataactatatgtgtaataagtacacttggaatgggaaaagtaactttaatatagtatcttgatgggagagagccctggaattgaagggcaggggaggcttacttttcactttatacctttctttaaggtctaatttttaaaaattatatacatattcctttaaaagaaatcaataaaaacttaaaagaaaaatatacttcataaaattttttaaagatttttttactctattacctaataataactattattagccaagagcagtgttgaacactttttatatataatctcaattcattaatttgttataatttgctttttatagtttcttgtgaaatatgaaagttacattttttaaataagaattttagcatatgggcttgtgtatcactggttagtattcatcagccacttggtatgtttgttaaaagctgcagaggctgaaaccctagactctgctctagtaaatcagagataatgtcctggaatttgaattttaaaagagttccagagatgattcttattgcaactttaatacactgctttacgtcactggtggtggtgtttttttgttttgttttgttttgttttgtttttttgctgttgttgttttgttttaagacagaatcttcactctgtcgcccaggctagagtgcagtggcgcaatcttggctcactgcaacctctgcctcccagccagtttcaagtggttctcctgccacagcctcccgagtagctgggattacaggtgcctgccaggtggtggttgtctgaaaatttatttcatttcctttcagtttaatgttagaaattaccctgctggtacctagagtccattttcatccattgttttttaaaataaatgttcttaagctgtctatttaaccttacttacgcttcattagaaaatacctgtgtgtcaaccatacatattttatgaatttttttctcgtagttgatcacagccgagttaaattgacattaaagactccttcacaagattcagactatatcaatgcaaattttataaaggtatgtactaactttaaatggtgtttctctgccatattaatgtctttctacatactagttttgtaaaaactttttgaattgctcaaacatgataccaacagcaaaagaaataaaaataaagccactgccctggcacaatgtttttatatgctttccttctagccttcttattcatatagataaatagtttctacttagttttgtgatagcagagataacattttcttttttatttcttctttcccatggaagtcttacctattactaaattattttctcagttatccctttggacacaaatgaacatcatcaatccccgttgttgacccatataggttgtttccaaatttttaaaatgataatattgcagtaaacatctttgttgttttgaataatttcttaggataaattactaggggtgggattactggataatactgatttaaaattctagaacatagctttaaatgtaaaacttttggcagttgtcactgtttcaggtggcaacccaaaatccaagattaaatagtctcttttataacctttgtttggataccctttgatgaaaagcagtcaagttcttttttttttttttttttttttttttttgagacggagtctcgctctgtctcccagtctggagtgcagtggcgctatctcggctcactgcaagctctgcttcccgggttcacgccattctcctgccttggtctcgatctcctgacctgtgatccacccgcctctgcctcccaaagtgctaggattataggcgtgagccactgcgcccagcgtcaagttctttatggtagcagtagagatagatgcaaagtgctacttgattcagtttaaataaaaggctttttttccatcagctaatctgtgatttttaatctttcaagtgatatgatagtataattttcatttattttatatatggtgtttatacatattttcatgtttttgttgataaaaatgttaactgataaaagtttatgccaggccgggcacggtggctcatgtccgtaatcccagcactttgggagacctaggcgggtggatcacctgagatcaggagttcgagaccagcctggccaacatggggaaacccagtctctactaaaaatacaaaaattagccggtcatggtggtgcatgcctgtaataccagcttctcgggagactgaggcaggagaatcgcctgaacccaggaggtggaagttgcagtaagccgagatcgtgccaatgcactccagtctgggtgacagagcaagactccgtctcaaaaaaaaaaaaaaaagtttatgtggtaaaattattatctatgtcaatattcagcagtcatggttttaaataaaaatttctttttttaacaaagttaaaaaccaaaatgaatacattaaataaaaactaataaattgatagtttgctatttcagatgttgtcaatgttcatattctttttttaaggctgtttgttaaaagttatagtttttacttatgcttaatgacactgattcattgtatgagtcagttatgtaccagtttagtattttagtcagtgacattgtttggtttatattctcatgttcattattaaaaacctgtatagtagatgcttgataaacttttgagttgaatagataatggaaggtagctatggaagaaactaagaaagagctcttcactagttttagtattgttttagaatcagagcatgctctgtatttctgccagttagctttgttgagtaggtattagggcttttgttattaatgcctagataagtaataatttttaattagcataaggcggttcttaaatacctattctgtgcaccatatccagtaaacacaaagtaatagcagtcatcaaaagcttaagtgaattgaatatattttgccatgctttaatatactatgaaagacacattatttggaaatggtttaagttaaaacaacaatattactaatacaatttgaaaccttatattttgggtaatgaaatatttttggtaatcaaaataaatgtgaaatttgcttttaaccatttttagggcgtctatgggccaaaagcatatgtagcaactcaaggacctttagcaaatacagtaatagatttttggaggatgatatgggagtataatgttgtggtaagtaatttacttttcacaataaattttgagaaatacttatgtaataacataggctattttactgaataaggaatgaggggatttttaaaaaatccataattatgtttacttattgctgatgtttactaaaaagatggacccatttttaggatgtctcattaaatttttacaaactaggctaaatattttaagaaggtgtgataataatttaaatcttgtcctaagtcagtaagtaatgatacagctatcaaacaacttataaaaagcagaaaaggattagtgctctaataggtcagtaaaatacttgatagtacagttatactcatttgagtccctcttctcaggaaaatatatataaacacataactataaatagactataaatatgcagtataagagaatttcatctatccctggagttcattcagtgccctcttgttcttttggatgaagggaaataatatgcccttagatttagaagcagagaaattagaatactgcgaagagctaccctatactgctctgtagtattcttgaaacctaaccatgtgcattgatacttttcattgtgtggatgtggaaaatcagtaatgtgaaactttcatttttgtcttacggctttttaatggaattgtaatgattctaaagcattgacatcctctggtctttgaaagattaataaaaggggggaaattttccagttatttatatttgctgtacttcactttaaaaactagatgtgcttggggattgagaaagagcatgaagaaactttctggatgatgggaacatcctgtatcttgataagatttgtgttgcacagatgtgtgtatttgtccaaactcggagaatgttcactttaggatttgtgcatttcattatatgtaaaatttgcctcaagggaaaaatactggaaacaatataaaaattatgttctagattggccgcgtggggtggctcatgcctgtaatcccagcactttgggaggccgaggtgggcagatcacgaggtcaggagatcgagaccatcctggctaacacggtgaaaccctgtctctactaaaaatacaaaaaattagctggacgtggtggcgggcgcctgtagtcccagctactcagcaggctaaggcaggagaatggcgtgaacccgggaggcagcgcttgcagtgagctgagatagcgccactgcactccagcctgggcgacagagcgagactccgtctcaaaaaaaaaaaaaaaaatttattgtgttctagataataatatgcatgctgaagtattttggggagagtgtactgatgttcacaacttactttgaaatgcatttttaaaataagatggattgatagagggatagctatgtgataaaacatggtgaaatgttaatgatagaatataggtgatggctatacaatgtttactgtaaaattctcaactatgctgtgtgttggaaagtttacattataaaatgggaaaaagcaggtgtgatcaacttttaaaatggtgttaaacgcattcaatatttaaataattataaatatatttttaattaatagtgctatttataattaggtaaatatcctaaaagtgatattttaatataatttcagaagtcacaaagtaaatctgtaagatttacatgatttaattcaaaccaaaaacatcatgttaattggaaccaatttaatttgttgctgtatagttagcccttgtttggaaagtctaattttgataatttctttaacttacacatttaatattgaaactacttttttaggcaagccaattatacttctcggtgcaaaattcttgaaatctgtattttattaaaaagtaaaattgtgtttaactgatacgttctttatctcactccccaccatcactttttagatcattgtaatggcctgccgagaatttgagatgggaagggtatgtataatctattcctcttactatttcatttttacggataaatattcttagtcttttattattatagtcttaacataagcggttaatgtagatacttcttttattttggggtactgctgttgcttttatttcatacaagggacaaaataatctctcaagcatgttgttttcttttatattttgtaagtatgttttatcacacacaggcatacctcagagatattataggttcagttccagaccaccacaatagcgcaattcaaacaaattttttgttttcttagtgcatataaaagtcatatttatactgtattatagtctgttaaatgttcagtagcattatacctataaaacacttcatgccttattttatttttttattttttctagacagagtctcgctctgttgcccaggctggagtgcagtggtacaatcttggctcactgcaacctccgcctcccaggttcaagcgactctcctgccttagccttctgagtagctgggattataggcatgtgccaccacaactggctaatttttgtagttttagtaaagatggggtttcaccatgttggccaggctggtttcgaactcctgacctcaggtgttctgcccacctcggcctcccaaagtgctaggattatagacgtgagccactgcgcctggccttccatgccttaatttaaaaataatttattgctaaaaaatgttaatgatcatctgagccttcagctagttgtaatctttatgctggtaaagggttttgttgacgttgatggctgccgactgatcaagttggtatttgctaaaggttggggtagctgtggcaatttttgataaaatacaagacaggaccaggaacggtagttcacatttgaatcccagcactttgggaggtggaggtgggaggatcacttgagcccagaaggttgaggctgcggtgagctatgattatgctactgtactccagcctgggcagagggagactccacctataaaaacataaaataagaaacagtgaagtttgccacattgattgtctcttcctttcatgaaagattgctctgtagcatgccatgctgtttgatagcaacagcagttgctgttctacccacagtagaactacttggcaaattggagtcagtcctttcaaacccttccactgctttatcaactaagttgatttaatgtcctaaatcctttgttgtcatttcaagtgctcacagcatcttcaccaaaagtatattccatctcaagaaagtagattccatctcaagaaaccactttattttcttatccgtaagaagcaactcctcatccattccaggttttatcatgagattgtggcaattcatttccatcttcaagctccacttctgattctctttgttgtttccaccacatttgcagttacttcctctactgaagtcttgaacctctcaaagttatcacgagggttggaattaactttttccaaactcgtgttaatcttgatatttcgacctcctcccacgaatcatgaatgtaattaattgcatctagaatgctgaatcctttccagaaggttttcagttcactttccctagacccatcagagtaatcatgatttatggcagctttagctttacaaaatatgtttcttaaataataagacttgaaactcaaaattactccttgatccatgggctgcagaatggatgttgtattagcaggcatgaaaacatattaatctccttgtacatgtccatcagagcttttgggtgaccaggtgcgttgtaaacggaaatattttgaaaggaatttttttttccaaccagtagtccccagtagtgagcttaaaatattcattaaaccatgcaatagggatgggctgggggtggggttgaaaaaacaaaaacatgctgtaaacagatgtgctgacatccaggccttactccatttatagaggacagacagagtacatttggcatgatttttagagcccttaggattttcagaatggtaaatgagcattggcttcaacttaatgtcaccagctgcattaacccctaacaagagagtcagcatgtcctttgaagctttgaagctagacgttgacttcttttctctagttctgaaaatcctagatggcatcttcttccaatataaggatgtttcatccatactgaaaatatgtcatttagtatagcttgtttcatcagtgctcttagcttagatctttggataacttgctgcagcctctaaatcagaatttggtgcttcatctcgcacttttatgttatggggacagcttctttccttaaacttcgtgaaccagcctttgctagcttctaactttccttctgcagcttcctcacactttatagaaatgaagggagttagtgccttgctctggattaggctttggcttgtagaaatgttgcagctggtttgatcttctatctagaccactaaaactttctccatgtaagcaataaggctgtttgacctacttaatttttgtgtgtttcctggagtagctcttttaatgtcctccaaaaacttttcctttttgttctaaacttggctgataagtacaagaggcctacctttctgcctatctcagttttcaacatgccttctttactaagcttaatcatttttagcttttttatttaaagtgaaaagtttgtgacccttttcacttgaatactttgaggccattgtagggttattagttagtctaatttcaatattgtgtctcaggaaataggaaagcccaaggagaggaagagagactgtacaaaaacttgtcaatggaacagtgagaatgctcacaacatctgttgattaagtttgccattttatatgggagcagtttgtagcaccccaaaacagagtagtaacttcaaacatcactgatcagattacaataacagatatcatcataatgaaaaagtttggaatactgcaagagtttccaaaatgtgacacagacctgaagtgagcatatgctgttgaaaaaatgataccgatatacttgcttggtgcagggttgccacaaaacttcaatttgtaaaatatgcagtgtctgagaaacacagtaaaatgaggtatgcctgtacttaacaataattaattaggtattgttacttagtaaacttcaaatattcagtggtgttgtaactagaatgctatctatggactgaaatagagaggtatttttaaataggaataaaattgaacaagtggaaatacattttaaaaatctggttatcattaatatatggtttgaatttttgtttgtttgtttgttttgagactgtgagacagaatcctgctgtgtcagtcaggctggagtgcagtggcgcgatctcggctcactgcaacctccatctcccgggttcaggtatatttcctgtctcagcctcccgagtagctgggactacaggcgcctaccaccatggctcagctcatttttgtatttttagtagagatggggtttcactgtgttggccaggctggtctcgaactcctgacctcaggtgatccgaccgcctttgtctcccaaagtgctgggattacaggcatataatcccatgtaatccaccgcaccaggcctgaatatcttgattagtctgtttgttaataccacagtatgttttgtttgtttcctatcttcaaaactgagagaagataatttcttaccctgattttctaacattggtatttttatgctatgtcgaagtaaaatttatttcaaagctattctggtatcctacagcatcatattctgtcctcactgtaggaggtaatgatatatttacagataattcatatttaaataaaacttataaagtgtggtcttctataaatatggcatacaaatcaaacttacaaattacatagtgattttatttgaagttttttaatactaatgtagttaatatatttaaaattatctttagtttgtaaatatgttaattttttcagtaagcaatatattgcaaaagatacatctttcagttatattacataaataattgggaagccttaatttattccattactcccaactatttcctatgtcagtattaagtaatgttggacagaaagtgaataaaatgagaaaatataaaaactgagaaattattaagtaatcaagttatctatttaagggttgtcaatatatacattaatattattaatcaattgtctaagagaatttaaatgtcattctcctaatgttttaagttactgttaaggtttaggatgtatttctcttttcattatattagtaagctcatagtatgtatcaagttattgatgaaaaatcaagtagcattgagtacataattttttgaagcgaaaggtttttgtgattcactgtgtcttattagtaatagattatgagcaagttaggaactatgaaattatctgataaccttgactttgatcttgactttgaatgtgacctggtggaaaaagcatagataattaaatcagacaaacctaccttttacaagcattttgaccatggtgcagtacagttcactctgagcttcagtttcctcacatttgaaaggaaataatacccaccttgcagtgttagagattatgtatgtatgatatttaacacatagtttttgatatcattattagttttataccaggaatataagtaccaatataatcttattactgctcatctgaatgaggggcattgttagtcacaccgctttctattcttaactaaattaatctcttacaacttgttttctatctgtttcaaagtattaaagttttgtcaggtaaaagattaaaaaaatgttttttaaactctcaaaaataatttaaggtccaagtgtaagtatagtggctcacacctgtaatcccagctacttgggaggctagggtgggagaattgcttgagcccaggagtttgagaccagctttggcaacatggcaagaccccatctctattttttttaaatcttttttttttttttgtggggagagacagtctcgctctgtcgcccaggcttgagtgcagtggcacaatctcagctctttgcaacctgcatctcccaggttcaaacgattctcatgtctcagcctcctgagtagctgggattaaaggcatgtgccaccatgcctggctaatttttttgtatttttgagtagagacaaggttttgccatgttggccagtctggtcttgaactccttgccttaagtcatccacccacgttggccttccaaagtgctgggattataggcatgagccaccacgcccggcctccatctattaaaaaaaaaaaaaattagccggttgtggtggcacacgcctgtggtcccagctactcaggaggctgaggtgggaagatcacttgagcccagaaggtagaggctgcagtgagccgtgattgcaccactgcacactccagcctgggtgacaaagtgagaccctatctaaaaaaagagagaatttaatttaatcattttctgtaaacatctcttggaaaatgagatttggaagttacctgtgtttttaagcctctaaaatgttagctaacccaacataccagacagttctactttgtttctctgtgagcattactgtcaacttatagttcattcagcctataggtaataactccatttactgtatttggaactgtgaagatttaattaggaattcattaaccaatgcatttcccactgcttaaaaggtttatttaagctagatggtcacttagagactttgattttattgggccttgatacaaattgcatcatttcttaatacctgaatcattctattttccataaagttaggcttttcattcacttaactgattttctaaaatgatgaggtgcttgatattagaaactgatgaaaatttatcattctttttctatacctgtttaaaataggaaggtaagaggagaaattatttgactacactttctgtaatctctaataaaattgaatagttaatacatcatgtttgtgtaggggttttaccatctgtggtacatttgaaatacactgttatttaacaaacatgcaacaactctgtaagataaggattattattcctatttttacagataaagaaactaaaggtcaataaaggagtagaattagtacttgcaaaattcttctgattccaagtagaatattctttccacttcatcacatattttacatttaatgagaattcagccagatatttgtagagattgtcatgttacaagcaatacaacttacctagcaacctttataccaaatacctccttgtaccagacacttttttaaaattagtttttcttgtctagaggaggatctttggtctactctgtagacctggcagatagcaatgaacagttatgcacttaagtcagtaaggttcttatgactattcttggagaagacacagtagcctattttttaaaacaactgggtaaatctaagctctctcagctccatgcctgctaatgtgggtttttctgttttggggaagtagaagtaagcagaacctcaggacacaaaatatttataacagtttaagaaaaacttacatgaattacttactaattttttttttttggatgacagaaaaaatgtgagcgctattggcctttgtatggagaagaccccataacgtttgcaccatttaaaatttcttgtgtaagtatccatttttgtaaacacttttttcagaaaattggcatgctatactgatgaataattaaattataatgtggtatgaacccaggcttatagacgccaaggactcacaaacctatgcttacatttaaaaaaattttgtttatatactgcttttaaatttggaagcttttgggttgacttcataaatgcatattttccttgtatcttactatattgattgtgtgttagtctttgtatatcaattgatagtaggtgtttacatgtaaatgaagtaactgtgcttttaatatttggaaatcgtgtattcatttcaaattgattaaatgggaaagacttggtaactggagtacagtgtatcatattaacccttcatatctaattgtgctctcaaaaattgttataattatatataaagataagtttaagacctaccatactggaagtaaagattggtcctgtctggcagattatttgatatgaaacttaaaatgttttcttaatatgtaatgacctctggaaatgaattaaattcaagctcaaaagctaacacagcaaaaatctgagaaaatgaataaaaaaatgaaaacagtgaaggaaataggagtaggaaaaagaaaggcatggacaaaaagaaggaaaatataagtgaattttaaaatagaaccaagttttctttaggtgccataaaaagactgtaattgaacataacctaaaaatcaattaatttaggccaggcacagtagctcatgcctgtatcctaccactttgagaggccaaggcgagtggatcacttgaggtcaggagttcgagaccagcctggacaacatggcaaaactccttttctactaaaaatacaaaaattagctgggtatggtggtgggcacctgtaatcccagctacttgggaggctgaggcacgagaattgcttgaatctgggaggtggaggttgcagtgagctgaaattgcaccactgcactccagtctgggcgacaagggtgaaactccatctcaaaaaaaaaaaaaattaatgaatttgcctatattagggttctccagagaagcagaaccaatagaataagagtgtgtgtgcatgcgtctgtgtgcatgtgtatacatttaaggagatttattacgaggaattggctcaggcagttatggaggctggccagtccaaaatctgcagggtaggctggagatcctggagagccaatgctgcagtttcagtctgaatgctgataagctggagacccaggagagctgatgttcagttctagttggaaaagtctgttgtagaatcaggatgagccgatgttgcagatgaaggcagcctgctggagaattctgtcttgcttcaggaggctggtccttttgttgtattcaggccttcaacagattggatgaggcccaacaacattatggaggacagtttgctttactcagagactaccagtttaaatgttaatcttctccaaaaacagtgtcacagaaataactagaataatgtttgaccaaatattctgggcacactgtggcccagccaagttgacagataaaattaaatatcacattccttattcagagtttcttgtttttgactttgttttccatgattaaacgaaatataatttctgtggttttacttgtcattgctgagttcttgaactccataattttatgacttagttatactcatgacttctgaattcctctcatacatacccaaagtttagtgctttctaggttgacataaaaaaggacaggactgtatctgtattatgctgtctactttataaatcaatgttgtttttataatgttaactataactcaccattgaactttttggatgtagtatttagtcaatattcttaaggtgctgattagaattaactatttgtggggtaaatgtaaaaattttaggccaggtgcagtggctcacacctgtcatcccagcactttgggaggctgaggtggggaggattgcttgagcccaggagtttgagacaagcccgggcaaaatagtgagacattattaacatttttaaaaacgttaaaaatcccactgcatttccttttatttggcttgaataatacccaatacacaccacactgtctacttcagtggggaaataccaaccctccttcaccaatccagaaagaaatctgtaatattagattcctcgacagtgtagaaacctagttctgtgtagtatggttgttttggacatttgtaaatttatttttaaagttttatttgtatatatctttttgagacaggattttgccctgtcagccaggttggagtgcagtggtctgatcatggcccactgcagcctcaatcccccaggctcaagtgattctctcacctcagcttcccaagtagtcggggctgctggcatgggccactactaatttttgtctttttgtagagacgaggtctccctgtgttgcccaggctgattttaaactcctgagctcaagcagtttgcccgccttggcctcccaaagtactaggactacaggccaccacacccggccaaacatttgtaaatttagatgtaataagataactatagtgaatattataattcaagagaaaatacagtgcttaacatcaacaacaaaccaacttgaaatttttgaacatttgagagtcaggaatagtaaacaatttacaataatggatataaggcagaatgcaatagtttataatgtagaaaatgaattgattcttgggggatggtttttcaattaaactaaaaggtatatctctataaatggttcacaaagaaaaaacaaaacatggagaaagatttattaaaaagaaaacagataacttgaaaggtctctagataagtggtttggtttgatttgattagtaacgacttggtttaatttgtcagcgtcaggattgatccatgctgaagaaatattttctttgataattttaaaatggaaggtaatttgtttgtcttataattggttcagacaactcgggatttgttatcattgacttaactgcaaagaaaaatcaaatttataaatagcatgttggtaaaaatattcgtagtaagtcatttgactacttggcagtcagagtttgagactgagaaatgactgtcttttctagagctctctctcgatgtgggatgaggacaagggtaaagtggtggtgaaagggtgaagactggttagcaggagctcaatcacatgttgccacatgtaagcacttagactggatgtcagcacactacccatggctcagatctagcccactgcctgtttcgtaaataaagttttgttagaacacatctatatgcattaatttatgaatttgtctatcacaatagcaaagttgtgtagacaaagactttgtggcccaaaaagccaaaaatatttactatctggtcctttacagaaatatttgaaaaagttcaaatattatttgaaaagttcaaagtaaattactgtaattttaaaaattaaagcaggtataatagtattatttttattaataaaacaacatacactgttgttcttcataatccttgttctaaactatctgtagttttaaccaataaggcaaaaagaataatttgcttagtgatagactgatgtagattaacactttgactaaatcacagtaagagacctttaaagtggttatgttatcaacaaccacaataataataataatttggggtgttcttccctcttccttcttcagttgctatccagttaattgaaacttgaatgttagggaaaatcatgtgttatggaaaggtaaaatggttgaagataggatatggtggttggtactgaggaatgacatttctatgtatatttacatgattctgggggtggttactactttgcagatattttattgggtggtagatgcttaagtaattcgtttagacacttttttttaggtataagtaaaacttacaaaagcaaattgatgtttttttctttactgtctatacaaatttttttaatgaattttttttcttcaagtttcttagtttagtaggtaacttgattcccaaattcacttctcttatttgtacatattgtttgggtctatctgttaggagactttatctgataggagacttcattttaaggtttttaaaaaaattttttttttagtgttttttgttttgagacagggtctcactgtgtcacccagactggaatgcagcgacgtgatcgcagctcactatatagccttggcctcactgctgggcttagtgatccacctacctcagcctcccaagtagctgagagcacaggcttacgcctcaatgtccagctagtttttgtatttttttgtagagacagggttctgctatattgttcaggctggtcttgaacccctaggctaaagcgatccgtccacctcagcctctcaaactactggcattacaggtgtgagccactgcctaactttttcaagactattttttttagagcagttttaggtttacagcaaaattgagaggaaggtacagagatttcttatatacaccctgtccccacacatgtagccctcattatcaacattccctaccagagcagtctctttgttacaattcacaaacctacattgacaagtcattatcaccaagagttcacattttacattagggttcattcttggtgctatacattctgtgggtttgaagaaatatatgatgacgtgtatccaccattgtggtatcatacagaatagtgtcattgctctaaaagtcctgtgctccacctattcattcatctcacccccttcccaaccctaggtagtcattatttttactgtctccatagttttgcctttttcagaagtcatatagtttgtttttgtttgtttgtttgtttgttttgagacggagtcttgctctgtcgcccaggctggagtgcggtggcactatctcagctcactataacctctgcctcctgggttcaagcaattctactgcctcaacctcctgagtagctgggattacaggtgcgcgccaccacacacagctaagttttgtattttcgtagagatggggttttaccatgttggccaggctggtctcgaactcctgacctcaagtgatccacctgcctcagcctcctgaagtgctggaattacaggcatgagccactgctcccagctcagaagtcatatagtttgaatcatacagtatgtagccttttcagattggcttatttcacttagtaatgtgcatttagggttcatccatgtcttttcatggcttactagctctttttttccttttattatttttaattgacacatagtatctatacttattaatggggtacatgtgattttggtacatgtatgtgtaatttaaaatgtggagtgactaaatcaggataattagcatgtctatcacttcaaacatttcaaatgtttgatgacttttagaatttttttataattatcaggtacatctggaattttaaagattaattttatattgtggactttgatacaagtattttatttgttttgatgtgtctttttgttttaacgttttcactgacttagaaatgtttctctttatttaggaggatgaacaagcaagaacagactacttcatcaggacactcttacttgaatttcaaaatgtaggtacttaccatttatagactatctgtaagaatagttttcaggctgggtgcagtggctcatgcctgtaatcccaacactttgggaggctgaagtgggagggtgacttgagtccaggggttcaagactagcctgggcaacatagtgagatcttgtgtctacaaaaagaaaaaagttagccgggcatggtggcatgtgcccatagtcccactcactcagaaggctgagcccgggaggttgaggctgcagtgagccatgattgtgccactgcactccagcctgggcaacagagggagactctcaaaaatggttttgagaatagagaatagttttcaaagagaagacatagagagggaggggagcgtgggctgaaaaaccacctattgggtagtatgctcactcctttggtaaggatcatttgtattccagacctcagcattatacaatacacccatgtaagctgcacatgtaccccttaatccaaaataaaagttgaggccaggtatggtggctcactcctgtaatccccaacactttgggtggctgaggtgggttggtcacttgaggccaggagttcaagaccagcctggccaacacggcgaagccccatctctactaaaaaatactaaaattagctgggcatggtggtgcacacctataatcccagctactcaggaggctgaggcacttgaattgcttgagcctgggagacagaggttgcaataagccgagatggtgccactgcactctagcctgggcaacagagcaagactctgtctcaaaaaataaaataaaaaataaaataaatgttttaaaaatagaaaatataatactactacctaaatgttttatttggtaaaatgggtttgctagaaaattattttgctttatatctgcaaaatgcaaataatatatataatatatattattattttgctttatatctgctttatagttttttgtaagtaaaaaaagtaacagcaatttttatttttaaagcatgtgaagttagtttttgtctttgcaaactaatcaacttttagctactaaaaaaataaaacaagctatataaatagtatactatgttatttaacataattaatgaaatttggtaattttttagttacgaagatgaaatgagagtgtaatatttagtcttgacatttatgcttatcacattacataaaaagtaatattaattataacataccctaaatttgttaaatttggaatagttatagcttctttgcagcaaatatttttattctattgcagtaagcaggttattgcattgtttatataattattaccctgttttactggtttacaatttgttaaagaaaagtcactatcaaagctaagtcttcatttagatatatattgtttttagttgaaaccccccacagcgccccgacttttttttttttttttttggcaacagggtctcactatatattgcccaggctggactcaaactcctgagctcaagcagtcctcccatctccaccttcctagtatctgagactatagggatgagccaccaaacccagctaaattttttatagtttatagagatgaagtcttgccatgttgctcaggctgctgtcaaattcctggccttgagtgatcttgccttttgcattggccacccaaagtgttgggattacagatgtgagccactgaatctggactggttgctaattttttaatctacggtaataataataagtaccttaatgaatttctgtggtagatcaggcatcttaattctgctaactgcatcatatccagatactgttacgtctgttgcacatagatgaagatacagaagctttaagaagttaaatagcttacctgaagttatttaggaaatggccaaagtaggaatttgagtatggtttgcttagattccgagtattgctctttctgttaaacacctgcaataaccattctcaaaacatttgacatcagtactcctttacattcttcaaagttattgaggatcccaaagtttttgtttctgggggttgtatctttcagtatatactatatttgaaattaaaactgagaaatttttaaaaaacatgaatacataagcatatattgtattggctgttaaagaataaggcacgtgacattttagtattattctgagaattatttaaagctcatagactccctcaaaagggttgaggggagggggtacccagaccgtatattgagaaccactaatctgtaagaagactagtgagtttggcattggacaaattcatctctccattctttttcagtttaatgttctgttagtcttctgattacaatggatactactctaacctactctaacatggtgcttacggtatattgctcatccatttaatagtgtagattagttaaatagtatatatagtgttatgtttacagtacatgctctggaagtagaactgcctggtttagagcccacacttgtcacttcttaggaaagtttgggcaagttattttatctgtatatctcagttataaaatgaggatggtattaacagtactttcctcatggaaattaaattgttacatgtgaagcccttaggtatttggcatgtgtttaacagtcaataagtgttggctattatttatttgggtttttttaaaagcagtgctaaatgccacacaaatttcttagaaatggcagtttaaatgagctgtgcaactttaaactttgcaaagtattttcataattgttgactttctgtttttcttgaaggaatctcgtaggctgtatcagtttcattatgtgaactggccagaccatgatgttccttcatcatttgattctattctggacatgataagcttaatgaggaaatatcaagaacatgaagatgttcctatttgtattcattgcaggtacaaaagaatttcccaagtttataaatacattatttaagtttgatgttacacaaggttttatttctgcattaatatgttagtaatcttgaatttctcctagccttgatacaatgtttgggactagggccttgtaagttgatgtggtctcatttggttgacagaccgtttagagtattgttgcattaaaacacaggatcatctatttgaaaatagtattcacatggtgggaagctatagaacatactctttttactgttcactgattagagcatataatctcagatcctcatcatactctactttctaaagtcagtatggtagtattttcttttaatcaatttccctgaaacaatgaccaagcaattttcattcctgataaacactgacatgagatttttaaaaacaggatattgctctgatgcccaggttggagtgcagtggcacaatcatagcttactgtaaactcaaactcctggcctgacgtgatccttctgcctcagcttcccaagtagctaggactacaggcatgtgctaccacactgaactaattttttttaattaaaaaaaattttttttaagagaccaagtcttgctctgttgcccaggctgatccgaactcctgtcctcaagtgattctcccactttgctctcccagagtcttgggcttacaggcgtgagccactacgcctggcaacatgactttctttttttaatatatgtaagatgtacatacgtaggtcttattgatctaagatatcatcaattctaagacacaccattattatatatattaacagtaaaaaaatcactgccaattataaggggacaatgtcatttgtaagaagccattggtggtaagatacataccaatctcagagctgttacattgagatgaaaaagtgtgttttagtttgatgaaaaactaaatgctgtttttattcttggggaacatcagtttccacgtttgcaccacttcctgtcatatcatgaaattttataatttatagctactgaaaaatttaaagccggaagcaagcattcttgtagtaaagtaataaaaactattgatacacatttactagacatttttattatgttttatagtagattacttcattataaggattacataaaattcaatgattactgacctagttaagctacctctgaatgtgaaaggacaagtataggtgcacctactttaaattgcacaatataaatcttttcatttattcaaataatatttgaagttcagttaggttttgcaaaattactcgtttggatgtgttaagaaatcatgtaaactcttcctttgactttgggggaatgaacatgagatttgtttattcttggggggcagttaattttgtattctagaaggggggttaatgtataatatattttagctaagagaaatcagtttaagataaccaacttttcttaatctaacattttggcttatttctgtcatctggtcattctcatacaaataatacaaagctaaatatacataatacatatgcacatatatgtatatgtatacattatatgtaatacataaaacaaagctaaatttgtattatggatttaggagtgtaatggaaaatacccctttaagaggaaaagcacaaaactgaattagtcaagaaaataataaatgtttgcaataagtgtcatgaccgggtatagtggctcagtgctttgggaggccgaggcaggatgattgcttgagcccagaactttgaggctgcagtagacaccaattacactactgcactccagcctgggtgacatagtagaccctatcttttaaaaaaaaaaaaagaatataggtatcattataatatgggtgatacaggatattttgaaacctaatttttggaatttcattatataggtatgggtttctacatagtagaagctacttgaatccttagacagtttttctactctgaatttttagtttacattagattcttctaaaggccttacagtcatagtacttacttcataagactgctatcaatttattcctctaagggacttgttatctgcattcacatttgttataaaaagtaaatgagatttttcaaacttaagagatttattttttattatttacatagttaaaatattttttcagtggagttgaagcattgaagatagttttcttattcacttggtttgaccgtaatgctcataattaacgaagtaaaagggctactttttattcatgggccaggaaagtaacttgctggtggagatgtgggaatcagttaacaacttggttcattaaaactatttttttctgtggttaattcagtggttagttgaccatttaattaagtaggattgaccagttaaaaataaacaatatgtttaattatagaattaaaagataaagaaattgctttcactttgacttcttataagttagttaaaataatttcctgttcaatcataaatccatttgtataggaaggcttttcatcaaaaactaaattgaccgttaaatatttttagacaatcaaaacagtacgttaactgtaaggacttagaaaacacatccataaaagcaagaaaattcttttgctttccactagttccactggagataaccattgttaaaactcgagaatgtgtcctttcagtgtgtgtatgtgtacatacagtattgttttgttttattttgtttgacggagttttgctcttgttgcccaggctggagtgcagtggcacaatctcggctcactgcaacctccgcctcaactattttaaacagcagtttaaatgcttagtggccactctgtttttttgtttttaatttactttaatggccatcttattgttaaatctttgagcacatctgcagttattaggacaaagttattattggataaatatccagaagtgagatttgttggtcaaggacataaacttttaaagtattttaatgagtattttttaatgtgttatccagaaaattgatgctacttaattctgccactggcagtatgtgagagtacctatttccctataccttccccaatactgtgtgttatctttttgtttgctttttttttttttttttttttttgagacagagtcttgcactgtcgcccgggctggagtgcaatggcacgatctcagctcactgcaacctctgcctcctgggttcatgcgattctcctgcctcagcctcccgagtactgggattacaggcacacaccactacacccagctaattttgggtattttttagtagagacggggtttcactatgttggccagactggtcttgaactcctgacctcatgatctgcccgcctccacctcccaaagtgctgggattacaggtgtgagccacggttcccagcctttgtttgcatttttttcttccttttttttttttttttttttttttgagacggagtcttgggctgtcgcctgggctggagtgcaatggtgcgatcttggcttgctgcaacctctgcctcctgggttcaagtgattctcctgcctcagcctcccgagtagctgggattataggcatgcaccaccacacccggttaattttatatttttagtagagttggggattctccatgtttgtcaggctggtcttgaactcctgacctcaggtgatcacctgcctcggcctcccaaagtgctgggattacaggcgtgaaccactgcgcccggcctcatcttttaatagttatacaagtgctttatatattgaggacattaacttttattcatgttgtaagtaccatggtttttcctgtcttctgcctgtttgcaatacataagtttcattttgtcatgtcagatttttgaatggtttttgtccattgagatatttgtacatagaaagtctttccctaacacaatagtgtatatattttgcatatatttttagtactttcatagatttactttttaacatttatcattggataaatatccaatatgtttatatcatatatatatatatatttttatccacctggattttttatggttaaggtatgtgatcagaatttaattttttgctcttcattgatagctaacttctcctttgccacttactgaacggtctgatctctggagaattcactgttatgtaagaaatgttacatgtactcagatctgttcctgaactttctattgtgtttcattgatctggttatctgtatctttatgttatacttttaactatcaaattttagatatatataatttatcccagtaactcaactaaaattctataaatgttttgatgcacagaattcacaaatgtatcaactaaaaattaatataattgattatgtttattaagagttttaaaaaatctttctaggttgtttatagtgtacttttatcaggaattttaggttacatgtttaacaaactgctgataggtatacatttcaaaatatgcattaaaatgttacacaactttgtgggggtttttgccaaagattattctggtgatgtcagtaacatcttataattactcatagtgattttcaattctaagatgcataagcctttctctagttgagaagcagttactttaaaatacttttgtcatgaggtttttttttttttttttttttttttttgagacggagtctcgctctgtcgcccaagctggagtgcaatggcgtgatctcagctcactgcaacctccgcctcccaggttcaagtgattctcctgcctcagcctcccaagtagctgggattacaggcgcccactaccacgcccggctaatttttttttttgtatttgcagtagagacggggtttcaccacgttggccaggcttgtctcctgacctcaggtgatccgccctccttggcctcccattgtgttgggattacaggcgtgagccactgagcccagcctgtcatgttttaaaataaaaaaacctatggtatgttactctaaagtccccagctcccattagttttttgggatatgagagcatatcattgtcttgttcttttgtggaaatcactgctgttgctcaatccgttttctagggcttatagcattcttcacctttcctataccttctatagattgaaatgatgtaccatttcctcctgtactctaaaacaagagccatcttttttttttttttttttttttttttgagttggagttttactcttgctgcccaagctggagtgcaatggcacgatcttgggtcactgcaacctccacttccccggttcaagtgattctcctgcctcagcctcctgaatagctgggattgcgtgtgtctgccagcacgcccagctaattatgtgttttcagtagagatggggtttcaccgtgttggccagggtggtctcaaactcctgacctcaagtgatccaccggcctcaggctcccaaagtgctgagattacaggcatgagcccctgcgcccagccacaagagccatcttgaacatagaataaatgtctctgtaagacgttgttagctagtcacattttctgatgtagcattagacttccagagtgacaacttagtagctattctctgtgtcacttactcttggaagttccttaaattaatttttgtttttctttttgagatgaagtcacactctgttacccaggctggaatgcattggtgccatcatggcttactgcagcctcgacctcccaggctcaagcaatccttctgccttggcctcccaaagtgctgggacaacaggcatgagccactgcgcccaaccccttaaaaatgaaatgtttaaaagatagaagacaataggccttccttattcaagacttcactgtcctcagtttcagttactcatagttcaaaaatatcaaatggaaaatttcagaagtaaacactttgtaagttttaaatgctgcaccattctgagaagcatggggaagtatgtcctgcttgcaagataaatcatcccatggtccagtgtgtacacactgtagactctaccagcccattagtcacatagtagatactgcagttaccagacggactgtcatggtgtcccagtggttatgttcacatgacccttattttacttataatggcccaaacctcaacagtagtgaggtagtgactagtgatagattgttataattgttctaatgtattattagttattgttgttaatctcttgttgtgcctgatttataaattaaactttatcataggtatgtacatataggaaaaatcatagtgtatatgtatatgtattctgtgtaacagatgttgccatgaacacactgtaagttgtattttgtttattactaagtagaattttgtcaaacttcttaaatgattttttgtttctgaatattaacatgtctatccacatttattttatagttgttttatcacaaaaatcaattgtttttcaaactttatatccttagtgcaggctgtggaagaacaggtgccatttgtgccatagattatacgtggaatttactaaaagctggggtaagaataattttttgtagcattatgttcaattgatctattatgattttcaaacttaattataattgcagtaaattatagtgtatattttattatacatgttattttttccaaagtagttttattaagtaagaaataaaggtagtgaaggccgggcacagtggcttacgcctgtaatcctagcactttgggaggccaaggtgggaggatcgcttgagccctggggctcgagaccagcctggggaacatagggagacccccgtctctaaaaataattaaaaaataaaatgattataaaaaataaaggtggagaaaaggtataattgctgcatattgcctttgataggatgcattgggcaacaatgtgacagtgttctaggtgagtgaatacttgcattaggatataaactgttactgacttttccaatactaaattttcattgcctttttttttttttcttttttttccgagatagagtttcactcttgttgcccaggctggagtgcgatggtgcgatctcagctcactgcaacctccacctcctgggttgaagccattctcctgcttcagcctccctagcagctgggattacaggtgcctgccatcacgcccagctaatgttttatatttttggtacagacagggtttcaccatgttggccaggctggtctcgaacttctgacctcaggtgatccactcatctcggccttccaaagtgccgggattgtaggcgtgagctacggtgcctggcccattgccttttatgtttactctaggtataagtgtatttcactcagtatgtatttatgcctgctggagacattatagtattgtagtctatgaatgctgactcgagccaaattgcccagattataattctggctttctcatttactagctgtgggatcttggtcaaaatactaatcccatagtgcctctatttctttatcagaaaataggggtcatagtagtagtaatgcataagaattaaataacttttgtgaagttcttcagaactatgtggtaaattgtaagtactcagtttattgttagtgttgattactgttgctgttgtgattgttgttcctactactgctttttccaagaaatagtgtttgatactgtggatgatacagagataaataagatacagccttcattatagatttgaaaaacaagtctcttcattatgtatacatttgattcttttgctggttccataatgtgttcatttctagagaggcgcctttaatccttcatagctttatagtttccatgaattgttcatctttgtcttgtacagagtagaattaataaaatgtttattttttctttttcttccttcttccccttatttctcttttttccctgccatctctccattttttattgttgcaaggaaatatttacatgttaaacagttccttaaaaagccctctggggttaaatatttttttcctcaaaaactataatcatctaattctcaaatgaaaatgcttaagtgaacaaaatttaactggaattcgatcacattttaacataaaagtcaaagattaaaattggaatgagaagggacacataaatgaatgctagcaaacaaaacaaacatttggtcattttaaaagttgtgtattttggataggtgccatggcttatgccataattccagcacttttgaaggctgaggtgggcggatcacctgaggtcaggagtttgagaccaacctggccaacatggtgaaaccccatttctactaaaaatacaaaaattagccaggcgtggtggccggcgcctgtaatcccagttacttgtcaggctgaggcaggagaattgcttgaacctggaaggcagaggttgcagtgagccgagattgtgccattgcactgcaaactgggtgacagagcaagactccgtctcaaaaaataaaataaaataaaagttgtgtattttgaacatagttctctctctctcttttttttttttttttgagatggagtctcactctgttgcctaggctggagggcagtggtgtaatctcggctcactgcaacctctgactctcaggttcaagcgattctcctgccttagtctcccgagtagctgggattacatgcacgcggcaccatgcctggctaatttttgtatttttagtagagatggggtttcaccgtgtttcgggctggtctcaaactcctgacctcaggtgatccgcctgccttggcctctcaaagtgctgggattacagacatgagccactgcacccggcctagttgttaagtcttcatgtaaaaatcttggctgggcgcggtggctcacgcctgtaatcccagcacttcgggaagccgaggcgggcggatcacgaggtcagcagattgagaccaccctggctaacacggtgaaaccctgtctctactaaaaatataaaaaaaatcgccaggcgtagtggcgggggcctgtagtcccagctactccggaggctgaggcaggagaatggcgtgaacccgggaggcggagcttgcagtgagcggatatcacgccaccgtactccagcctgggcgacagagcgagactccgtctcaaaaaaaaaacaacaaaaaaaaaacccaaaaatcttatgatgtatataaggacttccaagcagcaaacctggaaatcatttttaacccttccatcttaatcactccaaaatattcttgttgataacagttatgatatttctgcttctgtaaacctccgccagtttctcactctttcagactgtcctcttccttgatacaaaaattgtgtgaatatcagatcttctcatgtcaacattgcctattgcagtagtcgcaattccatatacacaaaagaattgtctaggtcgtttcataattagttccccaacttggagccaaaggatctatatttttacctaggtcttttagctggtccttatatagccaatccaggagatactggccaatagaataaattcagtctctttattatgttcacagtctgatcctaaatatccttatcttctctcctcctttgagtaccttctccttcttttagtcttaggctttgtttacatcaaacttctcaattccccacatagattatacattgaatctgctgtgcttatgtatatttccttcactttttatgggataaccttcttttgatatccaactatgttgtagctgcacacactcaacagttagccatagcctctttattccctgtatactgcagtcatactttggctggacataactgtctccccatcttgaatgctgagggtcaagaacagttttgtttccacagtgccaagcacagtgtctgagatgcattaagtggtgttcaataaatgtttgcagtaaaccagcaggtatttaagttttatgtgaaaagctgaagaagattttactattttctgaatagatacacaaagttgatgtattaaattttctgttttagaaaataccagaggaatttaatgtatttaatttaatacaagaaatgagaacacaaaggcattctgcagtacaaacaaaggtatagttgtttgtttccctttataaactgctattttataaatgctttcttcttttttaaaatgttgttttcattttgttttttaatcatttttctccttcataggagcaatatgaacttgttcatagagctattgcccaactgtttgaaaaacagctacaactatatgaaattcatggagctcagaaaattgctgatggagtggtaggtgttcttggtctattaattttaggaaacttttactctttgttaagatgtaatatttagccttttttttgttgtcttgtgttttgtctaacatgagaagaatatccaggacacttaacatttttacttaaactcatttccttcttattcgtatctgtattatgatggctatttaatgactccgatataaggtaaattatgttctaaatgaaataaagttaggaaagatctcatgtcaaaaatcatataattcgttaatgttttacttttttaaaaaataattgcattgttctctttactcttcccttccacccccacccaagtaattctgcattgattctacttgaatttcattttgtataaagtgttttagttatctgtgtatatgcttttcttttcttttcttttttttgagacagagtttcactcttgttgcccaggctggagtgcaatggcacagtctcagctcactgcaacctctacctcccaagttcaagtgattttcctgcctcagcctcctgagtagctgggattacaggcgcacgccactgtgcccagctagtttttgtatttttagtagagacggagtttcgccatgttgaccaggctggtctcgaactcctgacctcaggtggtctgcccgccttggcctcccagtgtgcaatgtgctgggattacaggcatgagccaacactcctggccttgtgtatatgcttttcagttaagcagaattaaagagccacagttaactcccttttgttgtgttataattcagtgttattttagccttgtaacatcttactggatattcaacttctagacctgacaaaaacactgtattctcttagtattctcatttctgcctttgttttctaaccaattgtcttgcttcaattctatatataaccaccttgtccctgaaggtgctgagattttttttttttttttgtagaatttgtttacatctttgtcattgagtctatgataactattacattgttaaaccaagtatgagaaaataagttgcaaaatttataaccttcattttccttttctccctttaaatggttttgtcagttcccagaatatttgtttgaattttcttggttttccaaatgacagatttattaccaaatgctgatctcagtttgttaggataatctaatatcggtccatgagttttaggaaatatgcatttcttttattagccaagtgacaatttcacgtttttaagttttatgtgacatcgttcttattcctttattaacataggaattattgtgcaaggaaatcctcctacaatgcctttagcttaattaaatcctattatgacatgctctgaatctagccaaatattttataatgtagaatcaaatgtgtttttgttttgttttattttgttttttgaaatggagtttcactattgttgcccaggctggagtgcaatggtgcaatcttggctcaccgtaacctccgcctcccaggttcaagcgattctcctgcctcagcctccctagtagctgggatcacaagcatgtgccaccacacctggctaattttgtatttttaatagagacggagtttgtccatgttggtcaggctggtctcgaactcccaacctcaggtgatccgcctgcctcagcctcccaagtgctaggattacaggcatgagccaccgcgcccggcctcgaatgtgttttttgtttgttttgtttgattggttttttttgttttttggttgttggttttttttttgatgacgaagtctcaccctgtcacttaggctggagtgcagtggcgcaacctctgcctcccgggttcaagcgattctcctgcctcagcctcctgaatagctgggattacaggcatgtatcaccacatccagctaatttttgtatttttagtagagatggggttttgcatgttggccaggctagtctcaaactcctgacctcaggcgatccccctgcctcagcctcccaaagtgctaggattataggtgtgagccactgcacccggccaaacatttgtattattttgtataatttaatctaagttgagatatttaatatttcgaaaagctgagtaggctataaacagttttctttaatttttgggtttttttttttttttttttttttttgagatggagtctcgctctgttgcccagaatggagtgcagtagcacagtctcggctcactgcaacctctgcctcccgggttcatgtgattttcctgcctcagcctcccaagtagctgagattacaggcgcccaccaccatgctcagctaatttttgtatttttagtagagacagggtttcaccatgttggccaggctggtcttaaactcctgacctcaagtgatccacccacctcagcctcccaaagtgccaggattacaggcataagctactgcacccagcatctttaaactttaattgaaaagcatttctgttttattccatgaattcaagattaatttcaaagctaaagtttttatatctggaaatacaggtttttaggctggatgcagtggctcatgcctggaatcccagcactttgggaggccgaagcaggcaggatcacctgaggccaagagttgaagaccagcctgggcaacatggcaaaaccccgtctctaccaaaaatacaaaaaagattagcctcccagactcacgagtacatcaccttgccgagtttattttttttatagagatgaggttttactatgttgcccagcctggtctcaaatccttggactcaagcaatccatccgcctcagcctcccaaagtgcaggaattataggctaaagttcttttattgcaatattcagtgtttgggttttgttttgttttgtttgagacgaggtcttgctatttcacccaggccagagtgcagtggaacaatcagggctcactgcgccctcaacctcccggactcaagctttcctcctgcctcagcctcccaagtagctgagactataggcacatataccacacctagctaattaaaaaaaaatttttttttgtagagatgttgccaggttggtcttgagctcctgggctccaacagtcctcccccacctcagcctcccaaagcactgagattacaggcatgagccattgtgcccagctattgttgtattttttaaaacttttaactatatttaaataatctccagaaaatatgtgataaataccgcatcaccttttcatctttttctaattagatcaaagtctgatctttgtaaggttttattccattgaatcaatccttttttaatatcctgaaatctatactaggattataattctatcataggctctttctgtctaataggtcagagctttacgggaatataataaaaaagtcatactttgtaggagatgagatgaaataatacccatagcagataagtagttaacttcaaacctactttcgtacctcattgcatggtacatagtagacataaactaaatgtttgagagaaatctctccatagatgaatggataaatagtaaaaaaaaacagaagaaaagatggattatcattccagataactttttagtattttcttcttaagaaatcatgttttctgtaaacttgtaaatataggtgactctttttataggatggctgtctgtggttgcagaccataaatcttaaagaaaatgtggaatctgaaaaattgagaaaaatcatcttagaactgtgtggttgaatgaaatgacttgaaaggtgtattaactatttagaagctatgctgtgagaagtaaaaataagtccccacttactacttttctgacaatttaatcggtaaaagttttgtttaaatgttctgtgttccagtattatttctgtagaaattttagtttgatatactagttggttgtttaagactttaaaatgaatagtgttttttagagatatttataactacagtgacttcctggagtgagagatctaaagagaaaatttattctgtaagcctgtatcatattgactgaggatttagaggtaccttaataagcaaacatctgttaagttgtgcagtgtgcctttttatcttgtgtgtaaaggacaccgttacaagtactgtcaacaccagtatttcagttctagaatgattaagtaatagcaataacagtttgtattatcgtccttttattgtgtttgtatagtacattttagatgtgataatgaattctggattttttttcctaaaatataatttttttatttttaaagcaccctgatttataatttattttcttctgcagctgataatattcttaaatattagataatttgtttcttaatgtttttgtagcatttcataaagctgttatatggaaaataacagtacgcaagataactttagaaagttctgtttaaaacaagagaacacaggctaggcgccgtggctcatttcatgcctataatcccagctctttgggatgccagggcaggagaattgcttgagaccaggagtttgagacctgccagggcgacaaagcgagaccccatctatacaaaacaatttttttttaattacctgggtatggtagcacgtgcctgtagtcctagctacttgggaggctgagatggaaggattgtttgagcccaggagttcaaggctgcagaggtatgatcatgccactgcattagattatttaattcctaaaattcttttccatttcaaaagttggtgattgcttcagcaagttgtatacatgacaaatgtggactcaaaaattataggtaataaaagagagtcagaagatgtgggtgtgtaggagacattaactaggaaatccaagaacattgtgaagtccagtgaccaggaggttttgtacatgctgtttaggtagtggctctttatcgaattgcagttctgcattgtcacattgattcctttcatcagaggaaactcagtatgttctgaaagctaatctctcccagaagctctcttttggttcttcctgttaatggcttcatcctgctcttactcacccagaatgaggaatccttcatgaaacctttactttctcacatgtagtgtttgcctaaaatgtccttactatctcttctctttacccttccacctgttttccttcttccaatcctcattcattttttgtcaaaatcttaccaatccctcaatgccattctgcattttaccttaatattgtcaacttactttttctcaattatattcttaatattctcaactatagcttttttttctgatttcatagcttcatagtactgattatgccactttggggctgtagtattacccttctactttttttctggggattttaccagactacattttgaagttaaagataataccatgtccttcttacattttagtatcctctgctttgctgactttattcagtgcatttcactagatgtccacattgccttacctgcagttccaaaatccaaagaaaacatagttttgttttgtttttgtgaattcaatattacactcacttggcaacaaaatatttcattgacatgacatgagtttatgtgtgctacaaaagaaaaatgctgttttgtatgttagaaacagttcaaaaggagtttcatatggtttgcctttaatttttatttaacctacttaatgcacattttggtacaaaatatcaagtgttacagaattatggttatatcattaatggaaataataagcagatgatcaataatatgttgggggtacttttttgtttttttttgagacggagtcttgctctgtcgcccacactggagtgcagagacacgatctcagcttactgcaacctctgcctctcaggttcaagtgattctcctgcctcagcctcccaagtaactggaattacagacgtgcaccaccacgcctggctaatttttgtattgtagtagagacagggtttcactatgttggccaaggctggtctcgaactctagacctcaagtgatccaccagtctcagcctcccaaagttctgggattacaggtgtgagccactgcgcccagcctagggggtacctttttgatgcagagtctctaaattctggtggtacctgaggatctgaaactttggcgaccaaaagtcctgatttgcgtgaggcacaccagttcacactagttgtctaggtttaataattaataatgcttctttttcattctcaaaagagccctgatttagacaataaattatatggtcaccctacctatagccagatatttctgcaccaaatgcctcgattttggtgggtggctttaattaaggaagaatgctttaagttttatgacataactctgttgttcttgtcaggaagtgatatgtataaaactattaattcatcagattatatataaggagatagggtgcacttaaaattgctaggaagttgagatctctagttgtttagttggaagtaattgaagtaacagttggacaagctgtcatgatggacatagtagaagtgccttttaattaaaaacaatgataacaaaacaaaatgcagctacggtttcagagttccttagttgatagtatgtgtaacgatggctgttgtctaaaattatctgagatgttggcaagggtgaaaatcattcctctcttctggacataacataccctagaattaaaataccctagctagataaatatgagatatgttgacagtgaaactaattcaaggccgtattttcatttcaccgctcccctattcacagtcctaaacctaaggttcttatacctgtattgactctgaaacatcaatgttaatgatgttattggtccttgtgaccagcaagaaccaaggatattctggggatgggctctgtctgcctttttgaggtccatttgggtagccagtgatataggagctatattccctaatggattagagcactccacatagtgacagagtgagagtgaggcaagaaatggttaaaatgaatcctaggaccaccagtttaaaagtactaggtagtaatggggagtcataaaaagatactccattacttggtaaatggtataagccttatttgttggctttttttttgtctctgcatatattaagttcctagtggtagtgatggcggggcggggggatactacgttctttaatccacattatcttggggaatctgtttttttacggtagcatttgagatgtgttgaaatgctgctgtacaccttgatctttccagtaactgtgatgcgctgtttttttgatacaatctctccattgaagtctggtccttcaggctaaaatatagagccagaatataagactttttttttttaacttggcaaaattggcattgtttaaggattgaaaagcacagaaacaatttagttgaaacatgaagaggaaaaattatttttctcttaaccttagtgaagtattttttcccttggcagaatgaaattaacactgaaaacatggtcagctccatagagcctgaaaaacaagattctcctcctccaaaaccaccaaggacccgcaggtattgtatgtcttcgaacattttctttaaaagcatacttgtttctactcactgttaattaaaatgacaaattctgaatatttctaaattacttttataacttttattattattttgttaggatgtaacatacgtatgacaactgatttgttactggtttattaaaaatttggtttcattttggataaaatttcaataatatactgtagcagaatgtggatactaccatgaattgactatggtttatgttttgatatgtgatataactaaaattttagttattctaaagattcccatttttttcctgatgactaaatatgcttgccaaaaattgcatgcatgttgaagtgtgaggatatttaataacgttactagcaaagatgagtttatttctttaatttttcttgcttttctaccaagctcatttataatagttaaaatcatatatattcatatctttcttttccttcccttcttgttcagggtagctgcttagtcagtaacatggtagtatggagagaatacagaggcagaagaagatagtttcaactcctttttagccatttagctctgggatctaggattaatttacttaatcctggggagaaggagttgtttaaatattgtcctaaggattaaataaaaaactattagaatattttatagtgtctttcttgcacatagatctgccaaaactgatcgacttcccatcaaaataaattcttttatacaggatacaccaattgtttccatcttaaaactttggggaaagttgggtcagacggccagggtcatgtcttagcattgagttgctaattccaagagatcattctaacgaaatcatctctctgaacaaaagaaaaagcctgcagcttccctcagtaactgaaggtttggttagaatccctgcacaccacaggaataatttattctcattttgaccatgcaagattctaactgcctgggaaggaagctgctgagtacagaaagaggcagtgtactctggtataaagaggctttttacataaataggtcccattccaaattttaactttagcatttgccactgaatgaactttgacaagccacttctctgaaaatactttacttcattgtagtgagagtactcgtattctccgtttttaaaaattagtgataatgtatataaagcatgtagttacatgcccggcctatagtaacagattttttaagtgtggtggtagttatagtctctagaatacctttgcatacttctcttaggaacctcaggaagcctatatatagatgaggttaggtctcaacatttaaatgttcgagatgttaactgtgtgctatcagaacttttagtagttctttcctgttcgatttccactttggtatccaccaaaactggttggcattttagccgtctgtggaaggtaaccagttgaaacctataaaatattaagttctctaacttctctgttccatataggagccctagaatcctaaaagaaactactggccctaaaaaaattaaggaacatttttgctgccctgtgttttaatttggtttttgagattgagccaatatagaggttttcaaagtctacactgatatttatgatttgtatgttcttctacctctaactacatgtagcagcagtctcttcttaattttacaggaaaaaagaatagaatatctgaatttaaagcctttttcctatacctgttgaaaagttttacttctgttactctctaataaacaaaaagataataaagaaaaaagcaaatgcatattaagaaaaaatattcaactcaagacagatttttattaggcatacattctaaaagttctttgtgtgtgattttataatacatgcataggtcaccttttttcttcttcatgtaatggagtcaaatgccagaatgtcattatttttgacaaagagaaccttgtgacttctaagttgggatgatttttagaactattataaattgttccaacataactgaaaataaaatcacaaaatcataagattgataacaagtaaaatagtatattttgtttttcagtatggctacagtaaacacattaattgtttgtttaaagtacatgatggggccaggcgtggtggctcacgcctgtaatcccagcactttggtaggccaaggcaggcggatcacaaggtcaggagtttaagaccagcctgatcaatatggtgaaaccccgtctctactaaaaatagaaaaattagccaggcgtggtggcacgcgcctgcagttccagctacttgggagactgaggcaggagaatcgcttgaacccaggaagcgaaggtgccagtgagccaagttcatgccactgcactccagcctgggtgaaaaagcgagactttgtctcaaaaataaaaaaagaaaaataaagtacatgttggctgggcatagtggctcacgcctgtagtcccaacattttgggaggctaaggtgggcggattgcttgaatccatatatatatatatataaaaatatgtgttgtgtgtatatttcatttttatttatttatttatttatttactttttaaacgtttttgttaaaaataagacacacacacacagtagcctaagcatacacagggtcaggatcatcaatatcactgccttctgcctccatatcttgtcctgctggaaggtatcgggcagaaacacacatggagctgtcatcccctatgataacagtgccctcttctagaatacctcctgaagaacctgcctgaagctgtttaacagttaactaattttttaacaattagaaggaatacactcaaaattaacaacaaaaagtaagtacgtggccaggcgcctgtaatcccagcattttgggaggccaaggtgggtggatcacctgaggttgggagttcgagaccagcctggccaccatagcgaaaccctgtgtctcctaaaaatacaaaaattagctgggcgttgtggcgggcacctgtagtctcagctacttgggaggctaaggcaaaagaattgcttgaacccgggaagtggaggttgcagtgagccaagattgcaccactggactccagcctgggtgtgacagagcgagactccatctcaaaaaaaaaagtacataagccaataactattttctttatcattattatcaaggattgtgtcctgtacgtaattacatgtgctgtgcttttatatgactgacagcatagtagctttgtttataccagcatcacaacaaacgtgaatgacgcattttgctacaaattcatgggaatttttcagctccattataactttgtggggccaccatgttatgtgtggcccatcattgactgaaacgtcacatgactgtacatgtctttcagtaatttttaatattccaattctttctgttttattttgttttgttttcagacagagccttgctcttttgcgcaggctggagtgcagtggtgtgattatggctcactgcagcctcgacctcaattgaacctcccaccctagactcccaactagctggaactatagacacacaccaccatgcctggctaatttccgtattttttgtagagatgggttttctccttgttgcctaggccagttttaaactcttgggctcaagggatccacccattttggcctcccaaagtgctgggattgcaggcgtgagccaccatgtcccaccagtattccagttcttccagttcttaaaagtgaacagaactaggaatgactgggcatttgacagaagcctctaatatgaaaaaacagaggaaatggagacaatacagagtaaaatgaaaaagatgggggaaaaaagaaacaacagtccacttttctcagtcattgggaaatgctgcaaccacgaaataagaactgtgggtaataagtaagaagctcttagaaattaagaatataggccaggcgcagtggctcatgcctgtaatcccagcactttgggaggctgaggcgggcagatcacaaggtcaggagtttgagaccagcctggacaatatggtgaaacccagtctctactaaaaatacaaaaaaaattagctgggcgtggtggtgtgtgcctgtagtcccagctactcaggaggctgaggcaggagaatcgcttgaacccgggaggcggaagttacagtgagtcgagatcgcgccactgctctccagcctgggcaacagaatgagactcttgtctcaaaaaaaaagaaagaaagaaattaaaatactataaatttaaaaattaagcagaagtttggaaaataaggaactccattttccaataaaatttccaaaataaagaaattcattcatttcaagaaaatgaatggataaagaaaaagtaggagagaaaagataaggaaattagaaagcaaaactagaagatctgtcactgaactaataatagtctaaaaggagagtagggaagaagaaattagcaaaaaaaaaaaagaagaaaaaatgtgttagaattaaagggcataaatttttatatagagcgtatacaccaagcttgatatacaccaccaaatgtgatggataaaaataaaattgttaaaaaatatagttttttaagttacattatgaaattatagaacatccaacataagaaccttgcttaggtttagagtaagataaaaataatgctgaaatttggagtaagtttttttaaattaaaaactttgaaaatactcgattaacaaacccatatatcatactcgatatctgtcaagcactgttctaattgttgttcagatgttaactcatttaattctcctaactaccctgtgaaaaaggtactgttaaggatatatggggtttgttaatcaagtaaatctgtaaaatactggtcatgaggccgggcatggtgtttcacacctgtaatcccagcattttgggagcctgaggagggcggatcacttgacgttagaagtttaagaccagcctggccaacatggcgaaaccctgtctctactaaaaatacaaacattagccgggcgtcatggcgcgtgcctataatcccagctacttgtgaggctgaggcaggagattcgcttgaacctgggaggcggcggaggttgcagtaagctgagattgcaccactgtactccagcctgagtaacagaatgagactctgtctcaataaaaaatatgtaaataaaatactgattatggaaaagtggtctcaccatgtacacgtagggaaaataatacacctcaatttatatcaaaattttatctcatccttttaaaactcatattttctatttgtattataatatgttcttaggataacctattggtctttgcatatgctttataaattgtaggaggtgtctgcaattatttttgttttagatcgcaaaaatttgacagccactctttcagattaagaaccaacttgtaggccaggtacaatgcctcacacctgtaatcccagctctttgggaggacatggcaggtgaattgcttaagtttaggagtttgagatcagtctgggcaacatgaacatggcaaaaccacatctctacaaaaaatacaaaacttagccaggtgtggtagtgcacacctgtagtcccagctgcttgggaggctaaactgggaggatggcttgagccctgaaggcagaggttgcagtgagccaagatagtgcaactgtactccagcccaggtggcagagcaggaccctgtctcaaaaaaaaaaaaaagaatctacttgtaaaacttgaacagatataggaatatcttatgagagtattgctgtcattttaatatgatcagtattctggagatattcatttatcttctcatgtcctaggaatgtgggaatgtgtctagagaatctgaacttcacagagtctttatttatttattttatttattttgagacagagtcttgctctgtcacctaggctggagtgcagtggcgtgatctcagctcactgcaacctctgcctcccgaattcaagtgattctcctgactcagcttcctgagtagctgggattacaggcgcacgctaccatgcctgactagggttttgtgtttttagtagagacggggttttgccatgttggttaggctggtctcaaactcctgatcttgtgatccgcctgccttggcctcccaaagtgctaggattacaggcgtgagccaccatgcctggcccacagagtctcttttaaggggaaacctggtgtaccatgtgattactgccagttatctggttggataaaaaaaggttgatcacctggggggagaaaaaaaagcaaaaactctgaggtggggtccagtggctcacccctgtaatcccagcactttgcgggggccgaggcaggcaaatcacttgaggccaggagttggagaccagcctggccaacatggcaaaaccccatctctactaaaaatacaaaaattagccaggtgtggtggcatgtgcctgtagtcccagctactcaggaggttgaagcacaagaattgctggaacccaggaggtagaggttccaatgagccaagatggtgccactgcactccagcctgggtgacagaacaagactctatctcaaaagaaaaacagaacacaaaaacttaaatatacaagccctcaagaagtttgcttcatataaagttcttaaaaagcaacaaagcctgggcaacatagtaaaccctatcttcttctttggtttttttttttttttgagacaggatctcattctttcacccaggctggagtgcagtggcatgatcagagctccctgcagccttgacctccccaggctcaggtgatcctcctacctcagccttcctagtagctgggactacaagcatgcattgccacatccagttaatttttttgtatttgttaaagacacagggttttgccatattgcccaggctgctcgctctctctctctctctctctctctctctctctctctctctctctctctctcactctcactctcactcgcgctctctctctcgctctctctctctttttttttttttttttttttttggagacagtcttgctctgtcgcccagactggagtgcagtggcgtgatctcaactcactgccatctccacctcctgggctcaagcaattctcctgcctcagcctcccaagtatctgggactgcaggtgtgtgccaccacacctggcaaatttttgtattattagtagagatggggttttactgtgttgctcaggctggtctcaaactcctgagctcaattgatccacccaccttggcctcccaaagtgctgggattacaggcgtgagccaccatgcctggcccctatttctttaaggaaaaaaataaaggcaactagagggtataacccacccgaacaaaggagtatacccagaaagaggaaaatgagacctgggaaacaggagaatctgaaaccagagagaacattagctctgtgatggactagggaaccagtagtccacactggagcaggaggccaaaagttactaacaaggatgtctgtggtattgatacttactatgtgtgcttgtcattattgagaggaggtataccaatctgcaagaaagttagaagaaaagctgagtaactgatgatgcatagagagctaagccatcagaaatccaaggcagtcattaggggaaaacaagacactatagaagaaaagatacgaaatcatggtgtcatagatgggaatactatctgcagtcatacgactgaggtaatgaaaaattacaatataacagtattggaaagatagagaaggacacttccacagtaggaagtcagtagaaaatgtgtgaaacaaagatcaagaaataacttttgaaatagtctgaaatacagaggtgtaaattttagaagcagctataaaaaaatgttgaaagttgatgcctctggctaacaggagggctgcggggcagagactatgtttttcattcaaagtcttgtatttgactttttaaacagtatatgtgtattaccttgatgaacattaaattttcttagtctgaaaaactgcagtttttattcgcaaccagattgtaatggctcttaatatgctactcttagctacataattctcaggtatcaacttgtttaacagtcttaaaatgccctttttaaatgtttgtttttcagttgccttgttgaaggggatgctaaagaagaaatactgcagccaccggaacctcatccagtgccacccatcttgacaccttctcccccttcagcttttccaacagtcactactgtgtggcaggacaatgatagataccatccaaagccagtgttgcatatggtttcatcagaacaacattcagcagacctcaacagaaactatagtaaatcaacagaacttccagggaaaaatgaatcaacaattgaacagatagataaaaaattggaacgaaatttaagttttgagattaagaaggtccctctccaagagggaccaaaaagttttgatgggaacacacttttgaataggggacatgcaattaaaattaaatctgcttcaccttgtatagctgataaaatctctaagccacaggaattaagttcagatctaaatgtcggtgatacttcccagaattcttgtgtggactgcagtgtaacacaatcaaacaaagtttcagttactccaccagaagaatcccagaattcagacacacctccaaggccagaccgcttgcctcttgatgagaaaggacatgtaacgtggtcatttcatggacctgaaaatgccatacccatacctgatttatctgaaggcaattcctcagatatcaactatcaaactaggaaaactgtgagtttaacaccaagtcctacaacacaagttgaaacacctgatcttgtggatcatgataacacttcaccactcttcagaacacccctcagttttactaatccacttcactctgatgactcagactcagatgaaagaaactctgatggtgctgtgacccagaataaaactaatatttcaacagcaagtgccacagtttctgctgccactagtactgaaagcatttctactaggaaagtattgccaatgtccattgctagacataatatagcaggaacaacacattcaggtgctgaaaaaggtaataatatagtgtcaaatacttaaatgtctttcctatgtgctagtcactgttttaagcactttagctgtattgatttattatgttttattccacactctaccatagaacctacagcaaaatctgtcttagatactaattttttaatataagcttttaatgtattgttaacaatttggtcacattatattactgggttttgtgtttctaaattattttagtagttataactggataacttattttctttttcttctgtattatagatcttagtgtttttgtatcggtcaaaaatttatctgactgaataattagaaataatttagggaagaatcacttaaaataacagtggcaaaaatactgtagaatgtcttgattggccatataatgttactcgtttttcctaaatgtttagtcattttttactgttcctttaactacagattacatttttttgtttgtttgtttttactgtcttcacaaatgcttccaaatatggctgcttccaaccctgagtttaacccaggaacaatactgcaaactgctcaattcagtagtgagtgggctatatgcatacctactcatcaaagctattatttaaagaattattatttttttagcactcttagcatttcaagataatgcatgcactcagttcccaaagtgtattattgcttcttgaaactcctctttgatctgctgaaagtaatgatggctaccatcttaaacagaccctaaggttgagagtaaacatataaatttgaaagctgtttattgatatattgattatcagtggtcacttacctatcagtgaactttggtagtgacacatacagactggtatttataacgtgcaggcaaaataagtactgtgaccttgaaagatttttttttttttttgagacttgcactcaaaagattttttttttgagtcttgcactgtcacccaggctagagtgcagtggcaagatctcggctcagcctcccaagtagctgggattacaggcacccactaccacacccagctaatttttatgtttttagtagagacagggtttcgatatgtttgccaggctggtctcaaattcctggcctcaagtgatctgcccacctaggcctcccaaagtgctgggattacagacgtgagctaccacacctggccttgaaagattattttctatttctgacccattatataccacccatactgtagtgcttgtattttctctcacacatactgtattttttaacttgagagagtgtatttggtagactagatgacagtctttttgagacagagttttgctcttgttgcccaggctgaagtgcagtggcgcaatcttggctcactgcaacctccgcctcctgggttcaaggaattctcctgcctcatcctccctagtagttgggaatacaggcatgcgccaccatgcctggctaattttttgtatttttagtagagacagggtttcactgtgttagccaggatggtctggatctcctgacctcgtgatccgcccacctcggcctcccaaagggctgggattacaggcgtgagccaccacgcccagccaggtgacagtcttaaactatttgcttaaattacagaattatcttttcttgatttatctttgttttatttgaaggatctttagaagataatgaatagtataatattactttaccagtttaccataattttaaattgctaatgtcttttgttcctcagcttcagaatttgaaatataactgcccagctgtaactatataagaaaatatgtagataagaaattttcattttgagtttttagtatatcaagcatgtggtattgtacctaggaagttttattgtttttttgttgttgttttgttcttttgcttttttttttaaaaaaaaccaaaaaaccattactggaaataggatttggtgagggccagaaagatgtatgatgtgatatgcttattaaaagttactactacatgacgagtctgttggtggctcatgcctgtaatcccagcattttgggaggctgaggcaggaagttcacttgagcccaggagttcataaccagtctgggtgacatagtgacacccaatctctacaaaagataaaaaactagccgggcatggtggtgcacacttgtggtcccagctactctggaggctgaggtaggaagatcacttgagcctaggagctcaaggctgcagtgagccataattgcgtcccggcactctgcctgggcaacagagggagaccctgtctcaaaaaaaaaaaaaaaaaaagagtaagatatagctaaaagcaccctactatgtgccagctcatttctgtttgtttggttttgtatttcaaagcaaaaatcactatacatgtgatttctggtttctttttactcaaccttaactatgttattggtttgattttaaccgaagattttcctgtgtgtaaatgttctttgttgcagcataactacaagtagtctcatttttaatgtgttgccaaatatttaccatatggattatttactttatagattgtttatttaccttatagattattatttcctttgtagatcattatcttatagagccattggcaccagaattagagttttggggggttttttggtcctagaacttgttagtgaattacagtcacacatttcttaatggcagggatatgttctaagaaaaatatgtcattaggcagttttgccattgtgtgaatgtcatagaatgtatttacacaaacctagatggtatagtatatactacacatctgggccatacaatgtaacctcttgctcctaggctacaaacttgtatagcatattaccatactcaacaattgtaacacaatggtaagtatttgtgtatctaaacatagaaaaggtacagtaaaaatatggtatcataatcttacaggaccgctgttgtttatgcggtcttgttgatgaaaacatcattatgtagtgcatgactataatggaatacttttgtattgatacctaaaaaaaacttttgcataagttactgcctgacaaaaattcttagctatcaattctaatttcagtcttgacttaggcctcctgaaagatttctcagattcaactacagaaggccccatacagtgtatgatttgcaaaagcctatataaaatacgcaatatctggttggataacctctaaaacaaaagtttttaacaggaaaggcagcccaaagttccagggagaaacatgcatttgcaaagcaagggccacgcttagaaaataaaagtttttaagggtgagaactgccatgagagaaaaagcacagagtttctggaagataactgatagaaaaagggctgaactgccctttttgttttgttcatttaatttaagaaatggtaccagaatgccaagattatgtgtcccttccttccaacagccatctcttcactgtgcgctgttagtagcaagagggcaaggagacatatggtgatgactcagactaccactactggataaggtagatagttctttagtggcaagagagagttctggtactcttggtagatgtatcaagtattggactggaactcctctttcaggaggacccagaagctgtattttcttgcgtctccagctaaataaatgtaggtggggcaaaagcaatcatactcacctcatgcgtgttgaaaattgacaagacctatgcatagccatcaggtgtggtaaaatagcagagtatcatggcagaactgtgtgttcatttaagaacaatgggcaaggctcaagacaaaataatacaggaccgtcgcatttctttttctttatcccaccctccccaacctgagagttcacacacaggattgtattcttatattttctttctattcctccagtgaaaactcaaagatcaaatacactcatttaccttaagccataataaagctaaccaatgaggcttacttaatgcactctctttcccaagagctaattttgtttttactagtgaaaaacctgtatatagcttcagtcagcattctcaaagtacagccatgtgccactgtacacaaaatctttagcaataaataaatgaagattttttaaaaaactttaatagctatatctttatctgttttggaaaaataactagtatttccaatgttatttcagttattgctgtttaagacatgactgaggtacacagttaagtttaaaatgagtcagattttaaaagtgaataggacacatgttacatagtatggcaaaaatcatgaaaggtgttaagcaattgaatcctgtttgggaaacactggcttaggcgtttcataacgcaaatgaccaaagctttcctttttggacacaaaacatcatcagtaagctcagtagagaagtcacttgccagctgacttctctactgaagattcccttcaggcttggagaactgaatgatgtctgtagagtgacaggaaagtcatgggagagagtcatttctgtatacattatctttgctcaataagcatcataattcttgataatgagtggaaaaggtttcttgcatttttttgcatttttaaaaactgatctagatatttgtgacaggaatttttagaatgtcaagaaagctctctgattttgtttagatgacatgttaatttgtctaaatttttatgtgtttaatttagatgttgatgttagtgaagattcacctcctcccctacctgaaagaactcctgaatcgtttgtgttagcaagtgaacatagtgagtgtctcttttgcttttacatttacttcatattctaataataaactccgaaaaacatacctgattttaatctattagctattgtgctacataattaaattcaaaaacaagtaaattgatgttgacatgcttttaattctttgtttgaaaaatgcttttaaattatattttttacttgctaagatcgatagaaattactgcatttatgttagatatcagaattcaattcatttaaatgtaattataggctgggcatggtggttcaagcctgtgatcctagcactttgggaggcctaggcaggtggatcacctgaggtcaggagttggagaccagcctggccaacatggtgaaactccatctctactaaaaatataaaaattagctgggcatggtggtggacacctataatctcagctacttgagaggctgaggcaggaaaatgacttgaacccgggagttggaggttgcagtgagccgagattgcgccattgcattccagcctgggcgaagagcaagatttcgtctcaaaaagtaaataaataaataaatgcaattacaaagccaggtgcagtggctcatacctgtaatcccagcaccttgggaggctgagatgcactgatcacctgaggtcaggagttcaagaccagcgtgaccaacatggagaaaccccgtctctactaaaaatacaaaattagccaggcgtggtggcgcatgcctgtaatcccacctacttgggagactgaggcaggagaattgcttgaacctgggaggtggatattgcagtgagccgagatcacactattgcactccaacctgggcaacaagagcgaaactccatcttaaaaaaaaaatgcaattataagtgtatttgcaatctggtgtattttcattcattaaaaatagcacttattgactcatgcctgtaatcctgccactttgggagaccaaggcgggcagatcacgaggtcaggacatcaagaccatcctggctaacacactgaaaccctgtctctactagaaatacaaaaaattagctgtgtgtggtggcatgcaccagtagtcccagctgctcgggaggctgaggcaggagaatcgcttgaaccccggaggcagaggttggagtgagccgagaccatgccactgcactccagcctgggcaacagagcaagactccatctcaaaaaaaaaaaaagtagcacttatttatgaaaacattaattgctttccttagatttaggtcagtaaacatttctgttgggtgggcgtcactggattggtgttaactgaaagacatttaacaccactggagtagactgagcacattggctcatacctgtaatcgcagcactttgggagtccaaggcgcgaggattgcttgagcctaagagtttgagaccagcctgggcaacacagtgatacctcctctcttctaaaaataaaataactgtccagttgtggtggtgggcgcctgtaatcccagctgcttgggaggctgaggcaggagaattgcttgaacccaggatgcagaggttgcagcgagctgagaccacgccattgcattccagcctgggcaacaagagcaaaaaactttgtctcaaaaaataataataacaacaaaaaattagccaggtgtggtggcatgtgcctgtagtccttgctactcaggaggctgaagaagaaggattgcttgatccctgtagttggaggctgcagtgagccatgatcgcaccactgtactccagtttggtaacagtgagaccccgtctgtggaagaaaaaaaaaagaccactggagtatcagaactgggagaaagtgatgatactttaaaacattgataatatacttctccctattaatcctctaaaaaagagtgcagaaacagcttgattgtatttacagtgtctcatgctcagtggaggtgctcacttgtctaagtacattttaccaatatattaattttgactgatttttgttttgtttcatttggttttctttttatttatttattttttatttattcatttttttgagatggagtctcattctgtcgccccggctggagtgcagtggcacgatctcggctcactgcaagctccacctcttgggttcatgccattctcctgcctcagcctcccatgtagctgggactacaggtgcctgccaccacacccggcttatttttttgtattttttttagtagagacagggtttcaccgtgttagccaggatggtccatctcctgacctcatgatccgcccacctcagcctctcaaagtgctgggattacaggcatgagccaccacgcccggctaatttttttgtatttttttagtagagacagggtttcaccatgttagccaggatggtctccatctcctgacctcgtgatcgcccgcctcagcctcccaaagtgctgggattacaggcgggagccaccacgcccggccttgttttgttttatttcgagttggagttccactctgtcactcaggctggagtgcagtggcacgatctgggctcaagctgttctcctgcctcagcctcctgagtagctgcgattagaggcatacaccgtcactcccaactaatttttttattagagatagggtctcaccatgttggccaggctggtcttgaactcctgacctcaagtgatctgcctgcctcagcctcccaaagtgaattttgactgattttaagataaatgttaaagagccaagcacaatggcttatgcctgtgatcccagcactttgggagaccaaggcaggtggatctctgttccatttgccctaggagtttgagaccagcctgggcaacatggcaaaaccctgtctgtataaaatcaaaaattagccaggcgaggtggcatgcacctatagtcccagctactcaagaagctgagatgggaagattgcctgagcctgggaggttgaggctccagtgagccgagatcgcgcctggtcaacagagtgagaccctgtctcaacaacaattaaaaagaatgttgaaagcaatgaaacggtatacttcagttgtctaagtctgtcacgttgtctgtagattaagcagtatacttcacttgtctgtcacattatctatagactgtaatacactgatgactgaatttatttacttaggttttgaaggaaggaaacagaatgttctcgaattaatagaaactacaattttttttttttagaaacttcagaaatatgcttacccagaaactacaaaatttttgtggaagcgatagtttctaaaatctttaggatctgttttttgtattactttaatgcaaagaaatttcagaaattcaaggtgttaataacaataagatttcatttttctcagatacacctgtaagatcggaatggagtgaacttcaaagtcaggaacgatctgaacaaaaaaagtctgaagtaagtccttttggaattggaacagttatagcttaacatttctactcttttgttaactaatcttgcagttgttgaaatagctgtcatcttaagatcgttaaatatagtttgtaatttttgatcggcatttcttatactaagatttcagatgaaaagcccatataaaaggtaggttctgaaattttttaaaagggtaacctgatctacatacaactatcactttaaagtattgttttctcaagctgtttttgaaatatgtaaattatgcttcaaataattttgaaggtatgaatgaaataggagttactattttcagggtcctaattctttcttacatttctagatgcttcccattataacactaggcacatagtcgcttcttttgtttttttctggctacctggcatttctttgacattcgagaaatgttttggcaattaaatattttgagggcgtggcatggtggctcatgtctgtaatcacagcactttgggaggccaagcagaaggatcacttgagcccaggagttcaagaccatcctgggcaacatggggagaccttatctctacaaaaatttttaaaattagccaggcgtggtggcgcatgtctatggtcccagctttttgggaggctgagatgggaggattgcttgggccccagaggtcaaggctgcagtgagccatgatcacaccactgcactccagcctgagtgacagagtgagaccctgtctcagcaacaacacatttgtccataggagataacattttttattaacattaatactttttgtattttctcccatactttaatatctctgaaatttagctacatcttatatttgattttaagacatgatgtagtttaattgacatataaaatacaataatgatataattagtaatagtggctggcaaaacacagctgtatgttccttcatgcagtagcccatgcttttcagtgctcatccagaaacatttactccaaggagaaatagcataacattttaaaattttaagcctaattaaaaaacaattgtttgcttttcctctgatgctgaaaatgataggccttgatttcttgggatatatacccataacagacccagctttctattatttgtatataaaatgaatgtattgtaataggtattaaatgtcttcctcgtagggcttgataacctctgaaaatgagaaatgtggtaagttgttagattttttttttcctttttactgtagattttattgattaatttctacaaaataacatgcttcatagttcatgctatatagttatttctgtatgtgaaaatgtctaggacaactcttgtagaagcttaatattgtactataattcttccaaattaattattaccaccagatagtagtattgatctggaaaatcatgggagcatttactatcaataattacaggctaatgggaaagagattttttaaaaatatttttctgttttttattttctgtttttaaaaacacctagaagttagatcccgacttaaataaatgatggaattgcttctgtagaaacctattgttttagaaatcttccttttagtactttttcatttatttgtgaagaccaataaaattgtgaaagaatgaatgaattttagtagttaacatcttttgttactaatcttaaacactggtaattaaagagtaaactacaatctaaacaacataaaactttaaaagtggagttattaggcctggcgtggtggctcacacctataatcccagcactttgggagacccaggcaggcaatcacctgaggtcaggagttcgaaaccagccttgagcaacatggtgaaaccccgtctctactaaaaataaaaaaaatagctaggcgtcatgccatctgcctgtaatcccagctactagggagactgaggcaggagaatcccttgaaccccggaggcagaggttgcagtgcgccgagattgcgccattgcactccaacccgggcaacaagagggaaactccgtctcaaaaaaaaaaaaaaaaaaacaagtagagttattatttcaaggtgcaaatagtgcattaattaaccctgaccttgttgatttcttaaattttttttttttttttttttttttttttttgagacagaggtcttgctctgtcgcccaggctggagtgcagtggcgcgatctcggctcactgcaagctccacctcctgggttcacaacattctcctgcctcagcctcctgagtagctgggactacaggcgcccgccaccacgcctggctaatttttttgtatttttagtagagacggggtttcaccatgttagccaggatgatctcgatatcctgacctcatgatcggctcgcctcggcctcccaaagtgctgggattacaggcatgagccaccgcgcctggcctgaccttgttgatttctatacaaagacatttcagttgcaactattcccttagaacataggcatatagtatagctaccttaagggaatgtaatatgtcaagacctagatttatgaagtaagaataacgagaatcctcacattgcagaagtactcactgcagatttctgtgtgaccacaataatacctgacatgattttctgtgcacactacacttgtatttatattgttcttgacctgtaaaattatggtgcccaggagagaaagttttctcttttcatgcttgccaacatttaaaaaattaaagagttatatatatatgatgctacaaaggatggtgattaacaaaggctttgtgttgctacttagatcatccagcgggaggtattcactatgaaatgtgcatagaatgtccacctactttcagtgacaagagagaacaaatatcagaaaatccaacagaagccacagatattggtaatttgtttaataaataatttttagtaagtagttaacactggcaggaatgagaaaagctcatttgccattgtgaaatgacacttgccaagaataaaacatgattttccaaagttgcttggactagtcatgaaataaatgaaatacttaattctatttcacattgagattaaaaactaaaatagaaaactgcagtataaaaaatcttttgtgttggaaagactaaattatcatggatatttttcttacattgtgataaaattggttttatttccagcataagatttttaaaagaagcaatcattttcagttattccaaataaatttacaattgttttgcatttaccaagttttgtttggcttaaattctaaattcccttgtggaaatttatttgttccagaaaatgagaatgtctgtggacatggtttttagtagtttgaaagtatttctgaacactgactagttattgtggtgttttcactgtaggttttggtaatcgatgtggaaaacccaaaggaccaagagatccaccttcagaatggacatgattcagggagctagaagacactttaagttatactggaaaattcaggtgccactgaaagccagatttatagtattccatctttaatatgtgggactaacagcagtgtagattgttaccttaatattttttgctgggaccatctacctgccttatactacacttaggaaaaagtattacatatggtttattttgaaacttcaagtattattgccttaatgtctcttaaccctgttacacgctgcttgtagacatgttaatatagtaatacctttatgatatattgagtttaaggactactctttttctgttttatcatgtatgcattattttgtatatgtacagggcaagtaggtatataatttgataaagttgcaattgaaatattattaacagaagatgtaagaaatttctgcatggtctaaatctttgtgtactttatttgtaaattatttgccctggagttttagaaaatagtttctgaattttaaacttgctggattcatgcagccagctttgcaggttatcagagatcaaagattgtaataataattttgtaaattgtaagcaaaaagttatttttatattatatacagtctaattgttcatcctaattgttcctgttttcatctagtcagagattcagtaagtgccttggaacaatattgaattctcttagcttgtgtgtgtttctttaatatttgaactcaagtgggattagaagactatcaaaatacatgtatgtttcaggatatttgacctgtcattaaaaaaaacaaacagttttacagtgcctacttgttgccttggcttttcatttctcattcctaggatattggacttaactatcagcctttttgctggctcagtcttggtatgaaatgaatgtgaatggggtttaatttctttttttttttctttttttagacagagtattgctctgtcacccaggctggagtacagtggtaccatcttggctcactgtaacctccacttctgaggttcaagtgattctcctgtctcagcctcccaagtagcctgccacgacgcccggctaatttttgtattttcagtagagatggtttcaccatgttggcgaggctggtctcaaactcctgaactcaggtggtccacctaccttggcctctccaaatgctgggattacaggcatgagtcaccatgccaggcctaatctcttaattaaggaatagagagtaccttctgcaaaaaacatggttctgcggattctaaatacttattgcccctaggcattcctcatccttatcattattagcctaccaaagtcctagtagaaaacccaacagagggggccagaccgggtggctcacgcctgtaattccagccctttgggaggccaaggcaggcagatcacttgaggtcaggagttcaagaccagtctggccaacatggtgaaaccccatctctactaaaattacaaaaaaattagctgggcatggtggcacatgcctggaatcccaggtattcaggaggctgaggcaggagaattgcttgaaccaaggagatggaggttgcagtgagctgagatcgcaccactgcactccagcctgggcaacagagcaagactacatctcaaaaaaaaaaaaaagaaagaaaaccaaaccaaggggatgttgagaacgggaactggtttcttgtcatcccatgactggagcacagattccattcctcaatactaagtctgaattttcacaaccatagattggaattgttggatatctgtattttccatctgcatacaaaagattgaagaaattgtaaaactaaagtacatggaaaaccttatatgagtagaagggggattgttgtggaggagaaagtaatactacaatttcatgttaaatttgttttaaagctaactggtcttcatgttgatccctgttgatcccttaggattttttttttttttgagacgaaactttgctcttgtcgcccaggctggagtgtaatggcgcaatctcggcttactgcaacctctgcctcctgggttcaagcaattctcctgcctcagcctccttagtagctgggcttccaggtgcccaccacaaagcccaactaattatttttgtatttttagtagagacggtgttttgccatgttgaccaggctgttcttgaactcctgacctcaggtgatctgcccgcctcagcctccgaaagtgctgggattacaggcgtgagccaccacacctggccaatcccttagaatttgaaaattttctgtatgctttggtaataaggaagtggtaatacagtagatgcttgacattttcaagacacaggcactcttgtaatagatctattcctaatacaatgtaaactgaaataaaagcataactgaaaaaatttttagccccttcacacacttgatgagttatcgtagactactaaaatcataaggatttttgtggttggggtggggtttcttggaataccttcactgaagtatacatgtattcagaagtatgcaaaaatcgtattaattgccaggtgcagtggctcacgcctgtaatcccagcactttgggaggctgaggcagggggaatcacctgaggtcaggagttcgagaccagcctcaacatggagaaaccccgtctctactaaaaatacaaaattagccgggcgtagtggggcttgcctgtaatcccaactactcgggaggctgaggcaggagaattgcttgaacctgggaggtggaggttgcggtgagccgagatcacgccattgcaatccatcctaggcaacaagagcaaaactccagctcaaaagcaaaagcaaaagaaaaaaaatcatattaatcatcataaagaatatcacctatgtgagtgtgaccgctgcctaggtcaagcagtagaacagtatctgcaactgagaagccacccccttaggcttctgaaatttgttcattttcatatgtgtagcagttatttgttctttgttttttgagacagggtctcattctgtcacctaggctgtagttcagtggtgtgagcctactgcagccttgaccacctgggctcaagtgatcctcccacgtcagcctccctagtagctgggagtacaagcatacaccactacgcctggctaattttgtttattttctgtagaaaataaaagtctcactatgggccgggcgcagtggctcaggcctgtaatcccatcactttgggaggccaaggtgggcggatcacgaggtcaggagatcgagactatgctggctaaaacggtgaaaccccgtctctactaaaaataccaaaaaattagccgagcttggtggcgggcacctgtagtcccagctactcgggaggctgaggcaggagaatcgcttgaacctgggaggcagagcttgcagtgagctgagattgtaccactgcactccagcctgggcgacagagtgagactccaaatcaaaaaaaaaaaaaaaaaaaaaagtctcactatattgcccagattagtcttaaactcctggccttaagtgattctcctgcctcggcctcccaaagtgctagaattacagatctgagccactgtgtcagccatgcatgtatcttttgtcacacacatgtacatgtatctgttggatatatattaaggagtggaattttgagatcacagagtttgcatatatattccagttttagtacatactgctagttttctaaattgatttttctaattgttaaaatccttgctaacacttgatatggtcaatacttttcattttagccattctaatgggtatgtagtggtattgccttacctgaatgtctatttctttgatgattagtgaggttgagcagcttttcacatgcatatgaccatgtggatatcctcttctgtgaactacctgttcaagtctgaagcagatactatttggtagtatcaactaaaactgaatataatacataccctaaatttagcaattttgtacctgtttttttcttacatacctgtaatcccagcactttggggggccgaggcgagcagatcacctgaggtcggtagttcgagaccaacctgaccaacatggagaaaccctctactaaaaatacaaaattagccaggcgtggtttcgcatgcctgtaaatcccagttacttgggaggctgaggagggagaatcacttgaacccaggaggcggaggttgcagtgagctgagatctcgccattgcacttcagcctgggcaacaatagcgaaactccatctcaaaaaaaaaaaaaaataaaaaaatctctttccactgtaagtactatcagttagctttcttttgggagccatttttcgcaaagtattttttactttatggacattttctacatatattgataaagcaataaagccatagttatatgtaagtgctgagctagactcagtcactaggtaactgacttgcttacatgtaacagcctcatagaatatgtggttcagatttttgcctgagcaaaatgatgtgactctatgttctaaacccttgaggccacttaaaatagtagtaactatgaatgttaaattattgaatgtaaagagtttactgtatatcagtttgcctttttatgttctgaaattgaatttactatagatagaacgttcagaattcctacttctatttagataattaaatggctatgagggaatgggcaggtctcttagttcccaagattctggcttggaaaggaaaaaatgtcaactttggatatgttgacttttaggtagacaataccttcagcatcaaagaagtgatatccagtccacaggtagaaatatatttgaagttcagaagaagggtccacattgaagatcaagattagggcattaatatagacatgaatgaaaccatgagtgcacaaaaccccagggagaataaatgaactatttgatatttaaatgaatttttgcagttacatggtaaatctttacatttctatttgtcaaaacatgatttgggttaaacatgggcaatatccccatgccagtcatctgaatcattttgtactctaggttctgatcaatcaattcaccttcctcactaccatcaagctgatgttgctagaaggccaacctggatctgctcttgactttgtaattgttacttctccctaagaaatatttaatggttctttattgcctgtagtaatgtttcatcaaaacattcaaaacctggccgggagcggtggctcatgcctgtaatccctgcactttgggaggctgaggtaggtggatcacctgaggtcaggagttcgagaccagcctggccaacatggtgaaaccctgtctctactaaaaatacaaaaattagccagtcatggtggcaggtgcctgtaatcccagctacttgggaggctgcagcaggagaatcgcttgaactcaggaggcggaggttgcagtgagccaaaatcacgccactgcactctagcctgggagacaaagcaagacttcatctccaaaaaaaaaaaaaaaaaaaaatcaaaacctggcccagattctcctgcactagaattgaggcagtgttcttaaaattcaggttccaagatcctactctggacctgaattagagtggagccaaagaatgcgtattttagacaagcagtacaggtgattctgttgcgtaataaaattggagaacaagacctacaggatcaagtccagactcctgagcagatcatgcaagacctgttcaagatcttcctgttgctattctctctggcctttactctggtcacatctgtgctccaaccatgagctacttatagtttccagagccccccaacgcccttagtcatcctatacctttcctcttgaacatcgttctttgtcctgttctgttgagccctactcatctaacaagattagttcaagtgtcatttcctgtattaaacttaacttgtcctgtctcccaacaagtcaaatcaaccatttcctctttgttcctatactgtttaagtacatttacttaaactttctgctctactaaactagcctctttgagagaaatgaccgtgaaatttagtggaaatattggcatatatagactcaggtagctaagtgtgaaaagtaggactaattttgaatataagtattttcttttttgtttgtttgtttgttttttgagatggagtcttgctctgtcgccaggctggagtgcagtggcgcgatcttggctcactgcaacttccgcctcctgggttcaagcgattctcctgcctcagcctcctgagtagctgggactacaggtacgcgtcaccacacctggctaattttttttcttttcttttagtagagatggggtttcaccatgttggccaggatggtctccatctcctggccttgtgattctcctgcttaggcctcccaaactgctgggattacaggcatgagtcactgtgcccggccttttttttattattatttttttgagacggagtctcactctgtcacccaggctggagtacagtggtgcgatctcagctcactgcagcctctgcctcccgggttcaagcgattctcctgcctcagcctcctgagtagctgggactacaggcacacgccaccatgcctggctaatttttttttttttttttttttttttcagtagagacgaggttttgctatgttggccaggctggtctcgaactccgatctcaggtgatccacccgccttggtctcccaaagtgttgggattacaggcatcagccactgcgcccagcgtttttgtttttgtttttgttttttgaggcagagtttcactgtcgcccaggctagagcgccgtggcgcaatcttggctcactgcaacctttggctcccaggttgaagcgattcttgtgcctcagcctcccgagtagctgggattacaggtatgcacaccacacccggctactttttgtaattttttagtagagacagggttttgccatgttggccaagcttgtcttgaactcctggcctcaagcgatctgcccacctcggcttcccaaagtgctgggattacaggtgtagcctgaatgtaagtattttcttaaatatggtcctgagtccaggtgtggtggctcatacctgtaaccccaacacttcgggaggatcacttgaggacaggagttaaaggttgcagtgagctatgatcacaccccagcactccagcctgggcaaaatgaaactccatccctttttttttttttaagatggagtctcgctccgtcacccaggctggagtgcagtggcgccatctcagctcactgcaacctccacctcccgcattcaagcaattccctgcctcagcctcctgagtcgctgggattacaggtgtctgccatcatgcctggctaattttttttgtatttttagtagagatggggtttcaccgtcttggccaggctggtcttgaactcctgacctcgtgaaccatccgcttcaacctcccaaagtgctaggattacaggcgtgagccactgcgccctgcctctttttttttttttttttttttttttttgtgagacacagtctttctctttcacccaggctagagtacagtggtgcaatcacagctcactgcccccttgacctcccaggctcaagcgatcctcctacctcagactccgagtagctgggactacaggtgcatgccaccatgcatgactaatttttgatttttttatagagatggggtcttgccatatcacccaggctggtttcttggatgcaggtgatcctcctgccccgacttcccaaagtgagactccatccgtaaaagaaaaagtattggccactcgtggtggctcacgcctgtaatcccaacactttgggaggccgaggcgggcggatcacgaggtcaggagatcaagatcatcctggccaacatggtgaaaccctgcgtctactaacaatccaaaaattagctgggtgtgatggcacgtggctgtaatcccagctacttgggaggctgaggcacaagaatcacttgaacccaggagttggaggttgcagtgagccgagattgcaccactgcactccagcctggcaaacaaacaaacaaataaataaataaatgtctactgaatagatgacttaaatccaagaccatagtacatgttaaggtagctagtccatacctggttttgatttatattcccagtagaagtctattaatagactcctattaataaatctttattttcaaacttaatacctcttgatctatttaaaacacttacataaagatacccatggagtaaagcttaatgtaggttgtttacactcttatccctgctcctggagtcagttcataagcagagtggttaaaaacaacatctactgccgggcgtggtggctcacgcctgtaattccagcattttgggaggctgaggcgggtggatcacgaggtcaggagatggagaccatcctggctaacaccgtgaaaccccatctctactaaaaatacaaaaaattagccgggcatggtggcgggcgcctgtagccagctactcaggaggctgaggcaggagaatggcgtgaacacaggaggcagagcttgcggtgagccgagatcgtgccactgcagtccggcctgggcgaaagagcaagactccatctcaaaaaaaacaaaacatcatctactaatattatttgccaagaatatacccatagtctccaaactttatatttgactcttttctgtaaacatctatacatgttttctgaaaattacatatataagaacagtttttggcctagcgcagtggctcaggcctgtaatcccagcattttgggatgctgaggcaggaggattgcttgagcccagaagttaagagaccagcctgggcaacattgtgagacctcatctctaccaaaaataagaaaattaggccaggtgcgttggctcacacctgtaatcccagcactttgggaggcctaggcgggtggaccacttgaggtcaggagttcaataccagcctggccaacatggtgaaaccccgtctctactaaaaatgcaaaaattagctggacatggtgatacgtgcctataaatcccagctactcaggaggctaaggtggggagaattgcttgaacatgggagacagagattgcaatgagccaagaccgtgcggctatactgctgcctaggtgacagagtgagactccgtctcaagaaaagaaaaaaggccgggtgcagtggctcatgcctgtaatctcaacactttaggaggccaaggcagttggatcatgaggtcaggagatgagaccatcctgggtaacacggtgaaaacctgtctctattaaaaatataaaaaattagcaggatgtggtggcacgcgcctgtggtcccagctacttgggaggctgaagcaggagaatcgcttgaatctgggaggtggaggttgcagtgagctgagatcaggccactgcactccagcctgggtgacagagcaagactccgtctcaaaaaaaagaaagaaacaaagaaaagtagcaaattgcggtgctcacctgtagtcccagctactcgggaggccaaggcaggaggattgcttcagcctgagagttcaaggttatagtgagaaagaaagaaaaagaaagaaagaaaggaaagaaggaagggaaggagaagaaagagaaggagggaaaggggaagaaaagaaagagaaagaaaggagggaagggagaaggaaggaagggagggaaggaaggaaggggaaagaaaaaaatgttttcagagttaaactaaaaagagacaattttgtgcctaatttaaaggggagcaataaaatgaattaatgcaatctgaagcttttgagagaaattccagtgaagaacggcatcttccttatatttagccttaaaacggtttttggattgtaatatttttgttgatatatatttagtactttttttttttttttttgagacagggtcccactctgttacccaggctggaatggagtagcaccatctcagctcactgcaacctccactccctggggtcaagcgatcctcccacctcagcctcccaggtagctgggactacaggagcgcactagcaagcctggacaatttttgtattttttgtagagacggggttccaccatgttgcccaggctggtttcaaactcctggactcaagccatctggtggtcttggcctcccaaagtgctgggattacaggtgtgaaccaccgcacccggcctatatttggtactctattgcaatctatgaaatcattttggtttaatattaaatacaatactaaattgaattagctcacttttatgctggttttagtaaagttcttgttgcttttggccttttacagaggtatctcctaattgcctgcttttaatggctattctaggtatcaaaaattcagattatattaataactttctaaataatggtgtataaagttaatttcagttttttagtactttattcttcaattctgggtcttcgttacacagccttaaaggccagaaattcatgttttcattctggcaaatagagaactgcaaaggctttaacccagattttggcatatttccactcaataagcaacccttgcatattgtgctaaacatggaaagtagatctagttttgaacataaactgtatttttaacagatttgctgcaacctgttcccttgtctccaaggtgcataattcctataaaatatgcaaatgaccaatattcagatcgtaaataatttgaccagtaaaagcagcaatgcttgggtagctcaaggagatagtctctctgttctaaagtac

SEQ ID NO: 847 - DNA, 3271 bp, Homo sapiens
aggagggagccgcggggcttggcggggtcgggagggagggacgtgctgggggaacgagctggggaagacggagcgggctctgtgccgggcgggcgggcggcgggggggccagcgaccgcagccggggggacgcgggaggatggagcaagtggagatcctgaggaaattcatccagagggtccaggccatgaagagtcctgaccacaatggggaggacaacttcgcccgggacttcatgcggttaagaagattgtctaccaaatatagaacagaaaagatatatcccacagccactggagaaaaagaagaaaatgttaaaaagaacagatacaaggacatactgccatttgatcacagccgagttaaattgacattaaagactccttcacaagattcagactatatcaatgcaaattttataaagggcgtctatgggccaaaagcatatgtagcaactcaaggacctttagcaaatacagtaatagatttttggaggatgatatgggagtataatgttgtgatcattgtaatggcctgccgagaatttgagatgggaaggaaaaaatgtgagcgctattggcctttgtatggagaagaccccataacgtttgcaccatttaaaatttcttgtgaggatgaacaagcaagaacagactacttcatcaggacactcttacttgaatttcaaaatgaatctcgtaggctgtatcagtttcattatgtgaactggccagaccatgatgttccttcatcatttgattctattctggacatgataagcttaatgaggaaatatcaagaacatgaagatgttcctatttgtattcattgcagtgcaggctgtggaagaacaggtgccatttgtgccatagattatacgtggaatttactaaaagctgggaaaataccagaggaatttaatgtatttaatttaatacaagaaatgagaacacaaaggcattctgcagtacaaacaaaggagcaatatgaacttgttcatagagctattgcccaactgtttgaaaaacagctacaactatatgaaattcatggagctcagaaaattgctgatggagtgaatgaaattaacactgaaaacatggtcagctccatagagcctgaaaaacaagattctcctcctccaaaaccaccaaggacccgcagttgccttgttgaaggggatgctaaagaagaaatactgcagccaccggaacctcatccagtgccacccatcttgacaccttctcccccttcagcttttccaacagtcactactgtgtggcaggacaatgatagataccatccaaagccagtgttgcatatggtttcatcagaacaacattcagcagacctcaacagaaactatagtaaatcaacagaacttccagggaaaaatgaatcaacaattgaacagatagataaaaaattggaacgaaatttaagttttgagattaagaaggtccctctccaagagggaccaaaaagttttgatgggaacacacttttgaataggggacatgcaattaaaattaaatctgcttcaccttgtatagctgataaaatctctaagccacaggaattaagttcagatctaaatgtcggtgatacttcccagaattcttgtgtggactgcagtgtaacacaatcaaacaaagtttcagttactccaccagaagaatcccagaattcagacacacctccaaggccagaccgcttgcctcttgatgagaaaggacatgtaacgtggtcatttcatggacctgaaaatgccatacccatacctgatttatctgaaggcaattcctcagatatcaactatcaaactaggaaaactgtgagtttaacaccaagtcctacaacacaagttgaaacacctgatcttgtggatcatgataacacttcaccactcttcagaacacccctcagttttactaatccacttcactctgatgactcagactcagatgaaagaaactctgatggtgctgtgacccagaataaaactaatatttcaacagcaagtgccacagtttctgctgccactagtactgaaagcatttctactaggaaagtattgccaatgtccattgctagacataatatagcaggaacaacacattcaggtgctgaaaaagatgttgatgttagtgaagattcacctcctcccctacctgaaagaactcctgaatcgtttgtgttagcaagtgaacataatacacctgtaagatcggaatggagtgaacttcaaagtcaggaacgatctgaacaaaaaaagtctgaaggcttgataacctctgaaaatgagaaatgtgatcatccagcgggaggtattcactatgaaatgtgcatagaatgtccacctactttcagtgacaagagagaacaaatatcagaaaatccaacagaagccacagatattggttttggtaatcgatgtggaaaacccaaaggaccaagagatccaccttcagaatggacatgattcagggagctagaagacactttaagttatactggaaaattcaggtgccactgaaagccagatttatagtattccatctttaatatgtgggactaacagcagtgtagattgttaccttaatattttttgctgggaccatctacctgccttatactacacttaggaaaaagtattacatatggtttattttgaaacttcaagtattattgccttaatgtctcttaaccctgttacacgctgcttgtagacatgttaatatagtaatacctttatgatatattgagtttaaggactactctttttctgttttatcatgtatgcattattttgtatatgtacagggcaagtaggtatataatttgataaagttgcaattgaaatattattaacagaagatgtaagaaatttctgcatggtctaaatctttgtgtactttatttgtaaattatttgccctggagttttagaaaatagtttctgaattttaaacttgctggattcatgcagccagctttgcaggttatcagagatcaaagattgtaataataattttgtaaattgtaagcaaaaagttatttttatattatatacagtctaattgttcatcctaattgttcctgttttcatctagtcagagattcagtaagtgccttggaacaatattgaattctcttagcttgtgtgtgtttctttaatatttgaactcaagtgggattagaagactatcaaaatacatgtatgtttcaggatatttgacctgtcattaaaaaaaacaaacagttttacagtg

SEQ ID NO: 848 - protein, 778 aa, Homo sapiens
MEQVEILRKFIQRVQAMKSPDHNGEDNFARDFMRLRRLSTKYRTEKIYPTATGEKEENVKKNRYKDILPFDHSRVKLTLKTPSQDSDYINANFIKGVYGPKAYVATQGPLANTVIDFWRMIWEYNVVIIVMACREFEMGRKKCERYWPLYGEDPITFAPFKISCEDEQARTDYFIRTLLLEFQNESRRLYQFHYVNWPDHDVPSSFDSILDMISLMRKYQEHEDVPICIHCSAGCGRTGAICAIDYTWNLLKAGKIPEEFNVFNLIQEMRTQRHSAVQTKEQYELVHRAIAQLFEKQLQLYEIHGAQKIADGVNEINTENMVSSIEPEKQDSPPPKPPRTRSCLVEGDAKEEILQPPEPHPVPPILTPSPPSAFPTVTTVWQDNDRYHPKPVLHMVSSEQHSADLNRNYSKSTELPGKNESTIEQIDKKLERNLSFEIKKVPLQEGPKSFDGNTLLNRGHAIKIKSDCIADKISKPQELSSDLNVGDTSQNSCVDCSVTQSNKVSVTPPEESQNSDTPPRPDRLPLDEKGHVTWSFHGPENAIPIPDLSEGNSSDINYQTRKTVSLTPSPTTQVETPDLVDHDNTSPLFRTPLSFTNPLHSDDSDSDERNSDGAVTQNKTNISTASATVSAATSTESISTRKVLPMSIARHNIAGTTHSGAEKDVDVSEDSPPPLPERTPESFVLASEHNTPVRSEWSELQSQERSEQKKSEGLITSENEKCDHPAGGIHYEMCIECPPTFSDKREQISENPTEATDIGFGNRCGKPKGPRDPPSEWT

SEQ ID NO: 849 - DNA, 62278 bp, Mus musculus
  misc_feature (1)...(62278): n = A,T,C or G
taatgtggtaagcaagaaagtaaacaatgataggaactggtaggagaagaaaaacaagggtttgggatttgagataaaaactatgaataaagcaaagcaacaattaaaaagtccacaacaaatctgtataagatgaaggaatgagaaaaagctttaaaagggtcaaattaaaatacagacagtctggttcagtggtagagtacttgcctagcatgcaagtacctgggggtgaaccctgggttcaatccccaggactgtaagataaataaatattttttaaaaaataaaaataggaacacatcagaactgtgataattggattcacttgaacttaaataagaactaacattgaagtaagagatgagattagggataaaatgataggctaaactttgtaatttacaaaatctgaaaaaatgttagcatagatttaagttgcataatatagcttgcaaggaaaatgaaagttatctgtaattgtcacaatacaacgtaattgatctgcctggtagtaataaggtaattctgacagtctaatgcaagtgcactagaaaggcaggctccagggacatgcttgctctggtatgcactagagaggggcactagaccatgccacctcatgcagtataatccttgcaccttctcgggagatacatctctccctgcttaataaggaagcaccagtcttctttttgttttctgccacaatgacaatactgaagagatccgtgattagtgcaaatgactcgctgaagttgtgctaacttgcactttgttagtcaaggaagcctgaagaaggaacaccaaaagcagctgtgtttctggtgcctcagacttttgggaacaaaaccaacagcattagcaagaaccagccaactcttgaaacccaacaaacctgactcacatgatcttctctgtccccctgaattctttcatatgctgtccaattcacatagtatgtgagcatcttcctacattccacattaagtcatcagcatctgatttgtgttggtgcgtttatccattgtgaatgtttgcaaaatgactttgtatgatttcaacacatccagtgtgtgtgtgtccctctgagccatgagctgaagacagaaattatcaccagtgtccactcctctgaactggacaaattaatgtcattctacatgactactcacaattatggaatgtctgggataaaatattccagagctgttattttaaaatgtacacaacaggtttccaaagtaaatagggaaatattaaaacaaaaagacctagaaaatcttgaaaaatgtcacacttagtaattgtatatgtaatttaaaaacattatgaaatatacatacaagagaagataaatgtatgtatacacatacacacagtgatacaacaaaccatcatatagctatctctcaggctcagaaacagagtagcagtgattgttctgaacccctcaacagaacagcctcttcagcactcctcctgctgtttcacttcactgttctccactcatgtcagtctatatttgctgtaccctgaagggccatgctgggtcacatgtctatgcctttgcttcagttctttcctccatttggatcaccgctcctctatttccaaccagtaggacaccatttacccttctgatctgtcctcagtgcctttccttacctgtcacttggcacttcattctcaatgtttcctgtatctcatacagtcttcaactaagcttttcattccactacttgatgacttatcccaatctagagactgtgagctccttgaaaggaagtatgtctttttcacctttgcctctctggaattttacacaagccctgcccttaataatctttcatgaactctggtcatgtactcatcacacctgggtagaaatgatgataagctaaatagcaataacaactctaacaaaatttatcacagatctttgaagaaatgaagctgtaattattgagcattttctgtgtactcagggattttacataaataagtttacccaaatcattacaataaccccgttattaacacatactgaaacagagcataaatgtggttaaaaaatggtttttgaatgtgtctatggtaaaaactttccactcaacatgtacctcttgttaaaaatagagatcaatttcttcttcccaaattattattagcatcataactgaaacagttactaatgtgattcatatgcccaggcataatttaggaatatttcacctaagacaacatgtcaaaaccacacccatctacctggcatccttcctgctccagtgctctgactggctagaacctcagggtgagtctgtcagggaaaaacagcaccagtgagaagatagctggcattaaggactaaaacttaacaaacaggtaagttctgatccatgaacttctctaaatgaacaaaataatgggttggtttaaaatttttttataattcttgaaattattttgcttgtacaataaaatgtgcatagtttaaaagtaagtcaggctcccaggattaatgtgagggaggatcatctgattgtgtgggtggtgccctaataaaccagctactggtcttgaccctaaactaaccccagttcagagatccatcaagcaggagaacctggtgatatggtaagtatctatgtttctagttaaactaccaccagtaaagttcctgccccccaaataagtaaataagttgactcttagcggggaatgtagctagcttgacagacagagcatttgtataacatgcaggaagcccaggcttgaatcaaaatcacccataaatgggacacattagtaacacaagcattggtggagacaagagcacagaagtgcaaggtcagcctccaatactcagtgaggttgaggccagtcagcccgtggtacatgtgaccctgtcttacacacacacccacacacaccaaaattcaagtcaacttctactaagcattataattgtaattcttttaaagttataagaaaaacaagaactataaaattaatggagagtcataaaaatcatactaaggtagcaaaagtcagatgattttatttctctaggattttagtgttagataaaaaagtttggaatgatttttttttttttttttggtttttcgagacagggtttctctatgtagcccgggctgtcctggcactcactttgtagaccaagctggcctcgaactcagaaatccgcctgcctctgcctcccaaatgctgggattaagggcgtgcgccaccacgcccggcttggaatgattatttttaggcactgaggttatttaatatttctgtagattatttttggaactacatctcactttgtaagaacatctttaacatacataccaagaaaaattatcctttctatttacaatagaaattagtcagtgatatttaaagataaattacaaaatcctaaatgaatatattaattaacagtagaactgaattgcaataaataaggaattgtgctgtcatcacaaagctttgattaggacagtagaagtactgactgtattaaagtcttacaaagtgcttcattactgttattaaaaaaattccttgttcaacaataaagtctgagttagtccaaaagtcattgaacaaacaacagaatcacgtttaaacttacaattagcacaggataatgcttcacaatgcttcctaatgcttatgatacaacaagaacaatctcaatgaacaattaagaaaagaactcacatcttcctatcattttacacttgtctggcaacttaaagaaaggtataaaatgtgtgtcatgttacatgtgtatatgccttaataaagaggtgttgtcctccatttaggctatcatcatataaaagaataagaaatgaaaacagtcatgggcagttttttaaatgttttaaataaaatattctatgttgaattttaaggaatagtggagttaaactacacacataggaggcaatgtgcttaagatacttgaaatagtacctgtaaataacaggcaggcaatggatgtccttcccttctggatataacaagtagctacctgttcccaagattgagggcagacactcctaggctgagatcacagtgttactaagctcagagcatgttcgaggtcttccatgacaatacttaagacatacatccaggcagtaagcactagctactctcattaatattaacagtatatgctgtgtggtggcagctcatgcctttaatcccagcactcaagagggaggggcaggtggatctctgtgagtttgagctcagcctggtctacagagtgagttccaagacagccaggactatacagagaaatcctgtcttgagaaaaacagaacagtctgctttttagactacattatttttgctcttacatagttgttcttatatatctacccactcctgcttaaatttccctatagcccagaccttttcaactaaactccagactccaggttcagaaaactgcctacatctccagttgtctcagagcatcttaactttaacaagtgcaacaacagcacagttctcccatctctgtgtccttcctgtagtgagtaacagaagagcacctctaccagaaagttacttgctcttggaggaaactggtccttagccttgtccccacctctgtcaatcaaatcctaccggtcatatttatctagatttagcagctcccttgcatctccacagtcagtattctaatcctaaccattatcttgcctggttaggattaactttctatcaagctttctctccccattctctattcaatagccaaagtggtctttttgaaatggaaaaatctgactgcctgacccttgcttaaaaccctttattacaatataaaagacttacatatgcccctggagccttagttagttggcccctgtcttctgactgtttaaagaagcagcctcatcacatgacatttcttgctaacccactacttagctcgcttatattagctcaaccaaagaaaaactgcattgatttcctttagctgtttgagctcccatactacctcaagctctgagacttctctcgggcttggccttgctctgaagcccctggcttgagatatgactggtttctgctctcaagcttcagaccttaagctcaaacacctgctatttaggatccttccttgaattctccacctaaattaaactctgcagttatgttatatcacataatcctttacttcactataaacaccaggaagtcagaaactgaaatctacttttgctcaaaactgagatgtggagctataataggtgctactgtgtcaaggaatgttctattcaccaaaccagaagggattataaatcagaagaagcatgcccaatgtgaaaacgtaatgtacacttgagagttgagtagatagggcagtgaatggttcttagttttatctctgactatggcttcagagatgtgtgcatatctcttatgtttctctcttctgttccattgttgttgagatcaggtctcacatatcctaagctgactttgaacttgctatgtagctggggatgaccttgaacctctgttcctcctgcctgcactttccaatttttgagtttataggtgtatgctaccatgtgcagtttatggagtggtagagatcaaattcagggtttcatgcatgctatgcaagcactctcccaacttagctacattccccagatcttctattctttaaacttttgtttaacttacagcattctatatatcttatttttacactttgagccatttttaaggcagaattttacaaaacaaaacaaaacaaaaatttccctcattttaaaaactgatctggtattgggtcagggaaaaggactgaagaagccctgagggccagcagaaagaatggaaacctgcaacttcaggaaataggaggttggggggaaccctccagaatgcatcagagacctgggaggcaagagactctcaggacgcaaaaggaaagacctttgatgaaacacctgacagtagggagagggaacttatagagcccacctccagcaggaagacaggacatcaagtgagggatggggttgccatcccacagtcacacctctgacccataactgtttctgtctgaaagaattacagggttggaaatggagaggagactgaagaaaagaaggtcaagggacaggcccaaagtgggatccggctcaaggagaggacccaaggtctgacactactactgaggctatggagtgctcacaaaaagggacctatcatgaccgaatgctggaagacccgacaagcagctgaaagagtcaaatgcagatatttgcacccaaccaatggacagaagcagctgacttctgttgctgaattagggaaggctgaaagaagctgaggagaagggtgatcctgtaggaggaccagcagtctcaattaatctggacccccaaacaggcagcatacaccagctgatctgaggtctccaacacacatacagtagaggactgccaggtctgtgttcattcagagatgatgtgcctagtcctcaagagactggaggccccagggagtttagagatcagatggggtggggcatggggacacccatgtggagacaggagggatggggaggaggtatgggatgtggaacagtcagagggtgaatggggggggggataaaatatggagtgtaaaaaataaattaacttataaaacaaaacttggtttaagtgttatgacccccagaaagtcttggccatcaaggtaggacctcctaagtacatcttctaaaatacctagtttttatttttatgctatcttttcacaggtccctctgactagactataatctccttagggcagtgttcctttatcttttggcatcaaccccatgcctggcccagtgcttagcacagtagatgcatatgagatatctactgagtgagtgaactaatgaattgaggaaactcagaacttacatagaatgctatagtaaaatagaaagccattaaacaattcataggatttaatttaaaaataatgtagctggggctggagaaatggctcagcaggtaagagtactgactgctcttctgaaggtcctgagttcaaatcccagcaatcacatagtggctcacaactatccgtaatgagatctgacgccctcttctggggtgtctaaagacagctacagcatacttacatataataaataaataaatcttaaaaaataataatgtagctgttgagtagaagcataaattaaaaacagtaacccagatggctatgcctagaactacaaagccggcagcccaaacgaaacatgtcataataggaggtttctttgaagataagcagaaaatacataaacacaaaaagcctccaagttactaaaatccactcatacttgggcctgggggtctgaaacacaggtggggttggggcgtgtccaaacccccgaaatctcatcctgagtttggcagggggaggattcccacccagcaccctgcccttgcatgtcctaacacaggtaaccttacaacccccacctctgccactctgaggtagtcacaaagcctgtggccaggttacaggttaaacttcgtctctccttctaaggacaagtccagcagcacctggaattcctccttatgtaaatgaggcaccctcaacacccttgcctggaccaatgatgtacactcatcccatatccccccacttacccctctcccaacggtttaagaagcctttgtcctctctccccaattaaacaagctgctcaatgaagcctgccttccaagaagtgttttcccctggccttttccacctcaatttccctctcaggccacctgtctaatcatgcctttaagggagggaaagcagagtgggaatgacaattcttatatcttatatgtttttctgcccattacttgggtagcttacataaacttgtttattttatgagacaggaacttgtatacccaatgatggccttgaacttgctatgtagtcaagaatgatcttgaactatggtttctcgtgccctgtgttacaattaccagtactatgggcattcatcaaaacatctagcttaggcagacttttaaagatttctttttattttatgtatataggattttgtctgcctgtatgtgcatcacatacatgtgcccacaaaggccaaaagacaccattggatcctctagtactaaagttatagacaattgtgagcttccacataggtgctggggattaaacctgggtcctctggaagagaagccagtgctcttaaccactgagccatctctctccctttaagtagacttttgatccataaaatccccataaaaactactgggacaaaaccctgacttctactttgtagtgctgctcttttagttgcatatacaacaaatcagactataatgtaagactatgactgagtgttcatgagatatattgaaagcacaattagattcatcctagtcccaaaaaagcagctgcaccctatcacactaaaggaagaagagaggcacagaggtagtgttaggcccaagctaacggttggccgagtctgcatcctgatgatgttaatacagttactttaaaactaagaagcagaagtaatttaacaagaaagttataaaagtctgactcagcaattgccaaaatctaaagagtgtattttgcttccccaaactgtgaccgtccttacatgttaaaagaagcggttaaacggataacggataaacggataaagatacctgcgctgaatgagatgaatgcacaggggaatgaggcccataacagaaagatccaaattagctgcagtctattttaggttgtaaaaacttcatattcatgaactgaggacatctgttcttgagcaaagtcacactacttgtaaatggtaagagttttctgaaagagaaatgcagctcaagcaagcaaggctctgaaagaacttgtgcctcagctttttccccagatgtcaagccaacatcctggcagcaacttgaccacaccctgctagcagctaaaaactgatttctgtgggagaattttactttatcagttatattatttgagtatttctctaaggttgcttcgatttagatcattcataattttaatgtttttcctaaatagactaaagaaaaagtggcctattgtgggtgcacatttctatatccccaacatttgggtggtggggtgggaaaggcttatttcactctacagcttttagtccattgataaaaggagatcaaggcaggaactcaaggcaggaaccaagaggctggaactgaagtgaggccatggaggagtgtagattaccagcttgttccctatggcttgtttagcttgctttcttatacaactcaggaccaccttgcctaggagtggcacttttcacagcaggctggcccctcctacaccagtcattaatcttggcagttctccactgctgtacctacaggccaatctttggaagcattttctcaattaagattctctcttttcagatagtctaggtttgtgcctacgtcacaaaaccaaccagcacagatccagtctcaaaaaaaaaattttttttaaagtgttgcttaccagccagggctatacagagaaactgtctcaaaaaaaaaaaaaaaaaatgttgcttacttgagatacagtcttaggtagccaaacatgatcttcaacttctggtttttctgggtctgtctcccaattgctacaattaaaagcatgccaccatgtctggctaaaattttaaattttgcaaaaattatcacatctttttgatgttttgttctatctaattttggagacaaaacctcatagtctcactctgtagctcaagatggcctccaactctcttgccccatattccaatgctaggattatagatgtatgcgactaacccaagcttctatgatatgttcttcacaaaactactattagcactttagtttcaattttatacctctgcgtgtgcatgcgtgttaagatgtctttcctcctcttcctgcaagcggccagcagtcacctgctgagatgcttcgctactctcttgacccagaaaaccccacaaaatcatgcaaatcaagagggtcaaaccttcgtgtttactttaagaacacccaggaaactgcccaggccatcaagggtatgcaaagccaccaagtatctgaaggatgtcactttaaagaagcaatgtgtgccattctggcggtataatggtagagtccgtaggtgcgcccaggccaaacagtggggctggacacagggtgggtggccaaaaaagagtgttgaatttttgctgcacatgcttaaaaatgccgagagtaacgctgaacttacgggtttagacgtagattctctggtcattgaacacatccaggtgaacaaggcacctaagatgcgccgacgaacccacagagctcatggtgggattaacccatacatgagctcccctgccacagtgagatgatcctcactgagaaggaacagatcgttccaaagccagaagaggaggctgcacagaagaaaaagatatcccagaagaaactgaagaaacaaaaactcatggcctgggaataaattcagcataaaataaatgcagataaagttaaaggttaaaaaaaaatgtcattcctcaggtgccacccatatttttattacattctaaatttttaaaaatgtgtgtgtgtgttttgatgtatgtccatatgagtaggtgtttgcctgtgtatgagaagagtccaggataggatgtagaattcttgggattgaagacgggcatttgcaggatgctgggcttgttatgtaagtacttacatcagaacttagtcctcaagattgtacagcaggcactctcaactgctgagcatctctgaagcccctactttttctctatcactgacatggaactcaacaaccagactaagttagcagtggagcagagacccacctgtctctctctcttaagcactgggattataagcgtataccaccacatccttttttgttttgtatttttatatatacatcctcaagattcaacacaattctcatgctcataacaagacaaggacttactgaatgagccacctccttaatccattctaaacatttttaatctataactaagataattggctacccacttgtaaaatacttgcttttatttgacttgtaattacttctttgacacttcagaagatgcccttggattcttatttatagagtaaataaatccatattgccttcttcaggtacttcatacttaactaagtttcttccgggtacagttttttgttttttggtttttttttaagttgaagaatctaaaaattttaacagtgcttcacactattttattcattctaaaacatttttaaaatctcaattttctttcaagacaaagcaattcaacagtatagaatatacagataaggttaaggctttggagtcagacagagctagtggttcctatatcttccagctgcataatcttgaacaaatcacccaacatcctttgcacagtgcctttattcataaaaccaggtattaagactagcatgttggttcatgcctatagttccaacatatgggagactgggacaagaagcaagtttcaggccacaactggctacataacaggaaagcttaagctacataacaaaacccaacctaaaaataaatccaaacaaacaaacaaaccctagttatgaaatacctatcaccaagagttgttacataggtaagtgaggcaaaattaaagatcatcaaattatgtatgctattccctgcctcccaccaagccaggcttaagaacctcactgtgcgtgttcactggaatttgctcactatattccatctgtactgactcttctcctgcctctgggtttaatgcctcgctgggctcttctccctttctttgagctatatatatgccaaccttctactgttcctggaacaccccaaatgctataatctgaagatcatttctgtgtcctctgccgagaacattctcccctcatatcttaactctttttatggccaattccttctcattatttaggttatttatggcctggtcagaaaaatccttcctgacttgctacagacttaaaaaaaaaaaaaaacaaacttgggactgtttgtctctccaactagtctgaatcctgagaaggcagaaaatactgcaactccataatctagaacatgtatatctagtaaagaataaatgcgtaaaagtgtgaaataaaaatatttaacaagaggttagctgaaaaaataaaaaacaggttaggatgaggatgtgaatgacctcaaatggttttgtaggcaagctggcctatttatatcctgcagaagatgatgaatcaaaggcttttaaaaagagtaaagaactcactgataaatggatattagccccaaacttaggatacccaagatataagatataatttgctaagcacatgaaactcaagaagaatgaagactgaagtgtggacactatgcccctccttagatttgggaacaaaacacccatggaaggagttacagagacaaagtttggagctgagatgaaaggatggaccatgtagagactgccatatccagggatccaccccataatcagcatccaaacgctgacaccattgcatacactagcaagattttattgaaaggacccagatgtagctgtctcttgtgagactatgccggggcctagcaaacacagaagtggatgctcacagtcagctaatggatggatcatagggctcccaatggaggagctagagaaagtagccaaggagctaaagggatctgcaaccctataggtggaacaacaatatgaactaaccagtaccccggagctcttaactctagctgcatatatatcaaaagatggcctagtcggccatcactggaaagagaggcccattggacttgcaaactttatatgccccagtacaggggaacaccagggccaaaaagggggagtgggtgggcaggggaatgggggtgggtggatatgggggacttttggtatagcattggaaatgtaaatgagctaaatacctaataaaaaatggaaaaaaaaagagtaaagaaaaagattattctcaataccttacttctatcagaagttttttattcataatcaaaagcacatcttgtacaactcctggctgatcagttgttctctccctgtttctttgtatagtcctgtcacatgcattttgcctgggacaggatttacatactatacacataattgctacacaatgtcatttgtattagacagataggattgcatggaggcacgaggagtaagctttacctaagattaaacaccaaaaagaaattcatctgatattgtctctcaatgatggtagctaggagattcccaccctggacacaggaatatggagtcaccataaatataaaaatcccattggcctgctctggagcagaagtgctcaactttggactccttgataactcctttttaattctatgtatgaacacgtgtttgtgtgtgaatataacatgtgagttcatggacccagggaggccagaagaggcactggatccccaggaacttgagttagaaaagtctattagatctctgatgtgagtactggaaacaaaactctggtcctgtgcaaaagaacttttatcctctgagccatctctgcagccccaagaatgtctgcttgctatcaaacacatgcctcatatttagagcatcttttgacctaactgcagctggggaaaatagaaatgaaagtcaacctaggctgtatatttggggaaaaaagtagattgaatattttaaagaaaagattaaaacttctggacagtaatatacttcataagcaacatcagaaaccaaacgaaccaaacataaatgatttcccataatgtataaagaagtctaacaaattactagagaaatataagtaaacaggcaaaaaagggcaaatagcatcataaaaaaataagcacaggagaagagagatattctccttcactaacaaatgcaaatcatgcaatcaatgtgtaccgtgtacatgtaaggacatgttatcacaaatccattaatataaacaactaatatgtgttaggaggatcagaatgttagcactattctgaatcactagaactaaaagagctaaaagagcaaacctcaagaaaaccacagctcactcagcatgacacttcggagactcagccatactaaagaggaagcagctggactgttgtaatatttttctgaccacatgagagaaaactagtttctgacagaacacagaggctaaaatctaaaatatgtaggaattaaaaaggggaagtaatccggatgtacaagcactgggattataggcagatggaactctgagctacattttgtttttcaaaaccttgcaacaaggttaaaaagggaggcagacatcagccatctgattctcaaaaaaaaaaaaagtatcaaagcatatgctcacaaaaaatccaaaacaacaacaacaaaaacagcctctttaagatagggtaccagaaatattgtattatccccatgcaaaagaatgaaactaggcctctcactcaaacactgtacaaaaatcaacccaaaatggaccaaaaacctaaatgtgaggtttgaacctttgaaaatgttttctttactccaggagatttaaagacacaaacatcagtggatggatggatggcacgctagtcattaaagctcatgtctgtggtcccgtaactcaacagactgaggtaggaggacctctcataaatttaaagctagcctgggttacacagtgagaccctgtgtcaaatttgagagagagagagagagagagagagagagagagagagagagagagagagagagagagagagagagattatacaaggcagtattaaggaaaatgaaatgctatttgctagaaaatgaatggaacagagcatcaagttaaacaaaataaacagactcagaaagacaactgatggcatgctttttcttacatataaaatctagattaacaagaagacagcagagtagagaggtccactgggaggtcagagggagaacaaaggagggtaatgggtgtgaagtgaccaaagtatattataatcatgtttgaaaatgctatgatgaaacccatcattatgcacaattagtatagactacttgagaagtaaagagatggggaaaaatgggggatgactagagtatatgttctttctgttcaactttctatgaaactaaaagtgctttaaagatcaagtccacttcttactaccgtgaagctggtccatttgtatagattttttacctgctcaagaataggagctgaggccctggttcctaaccctcggtcctaaatcttgatggcccctgatttttctaggtctctcccctgttccagacttctctaggtatctaagacatcttatatttggactatgatttgatgaggctgataaccatttacagtttctcagttgaaggaagaaaaggacatatatcataaatacagggagaacaaagataaggagcaaaatcccaaagttcacagagtaggggttgtggcctttctgatgtcccactgttaactgggttggttggttatttatttatttcctttgtttgtttgtttgatttgttttattttgtttttcaagacagggtttctatgtgtagccctggctgtcttggaactccctttgtaggccaggttatcctcaaattcacagagctctgcctgtctctcctcctgagtgctgggattaaaggcaggtgccacagccaccatgcccagctggggtcatttctatcagtgtgtctacatcactcttttcttgctcttcttttctgtattccttgcatgcaattccttaaacagactctctaaagagcataaatactacttgcatcagggttcaggctataacacagtggtagaacacttgcctagctaggccctgcttctattctgagcacaaaacaaacacccactagtgcctgtatttattaaattgtatgtgtgtcctgaaagcatgtgtgcatatgtggtgaagtttggaagataacttgcaggaactggttctcttcttctaccatgtggattccaggatcaaactcaggttggcaggcttggcagtaagtgccttactgctgagttgccttttctccccatacctgtgcttagagtgtccttaggagagcaggatacatacatcacaaggcccctagtagcctgaaaaccagccatatttgggtcagggtctccctggtcctgtctgtttgatttagaccaacccatcttagatagatcctttggtttctcaacaagggcccagattgggaagtatgttactcatggaaggaaccatgggtaaattcatttagctatacataatgaggaggagggagaggaagaagaggagaggaggaggaaggcggtggcggcagtggcagcagcagtggtggtgttgccttagcataagtgtcaggagcaggttatagaaaaagaggcatgtgaatagcaatagcgaaagtatgtgtgcaaggcctatagcagccaagacacccaagtcattctgaaaattccattctcagcaggcagtatttaatctccactcactttaatgctatgttttaacttagaaaaacatctgtgccattcctcactattctaagaattggggctatttttattttattttattttactctactttatagtactgggagggaacctaagacgttgtaatagctaggcaagtgctctaataactgaggtacatacatcctcaatctattttattttgagacatattctcactacattgctcaagttaccctttcttacataaaacaggcctcaatctgttgtaaccctctgactcagcctcctaggtatccaggactatgtatttttaagtgagaaaataaaatattaaaaaagatcatgacaaggattttaaggctcatcccaaaactagatgaacttttcccttagttttggctatgtctacatcttgatcttaaccctaattatggtcctggaaccagtattaattattatacagtgatttgggaagacagttttgtctgcacagctgttacataagaaaaatgagtttttctggcaaaagaagaaaaagaaaaagaaaaagaaaaagaaaaactcttgcttgagtagtgccaacttcttaaaaactgaaagcatccaggaactccatggttcctcctggtctgggcctgtgccctgagcagaccttgggcgcaaactccacaaccagtcccacaacagccagaggaagatccattcccaggcattctaacaagcccaggaccaaaggatcacaggatcctaggaacttggtcacatcaggatctcaggattccagaggcagcttgactcccaggagctctgacacacccaggatcacaggatctcagaatcataagattacagagacagcagaactctgaggagttctgacactaccaggatcacagtaaggacaggatccagtcagatatagcaagggcaggtagcactagagataatcagatggcaggaggcaagcttaagaacataagcaacagaaaccaaggttactcggcatcatcagaacccaattctcccaccatagcaagtcctggatacaccatcacatcagaaaagcaagattcagatctaaaatcacttctcatgatgatgatagaggactttaagaaagacataactcccttaaagaaattcaggagaccacaggtaaacagctagaagcccttaaagggaaacacaaaatcccttaaagaattataggaaaacacaatcaaacaggcgaaggaaatgaacaaaaccatccaagatctaaaaatgaaaatagaaacaacaaagaaatcatgaagggagacaaccctggagttagaaaacctaggaaagagatcaggagtcatagatgcaatcatcaccaccagaatacaagagatagaagagagaatctcaggtgaagaaaataccatagaaaagattaacagaacagtcaaagaaaatgcaaaatgcaaaaagctcctaacccaaaacatccaggaaatccaggacacaatgaaaagatgaaacctaaggataataggtaaagaagagagtgaagattcccatcttaaaaggccagtaaatattttcaacaaaattatagaagaaaatttacctaacctaagaaagagatgcccatgaacatacaagaagcctaggttgacttttaatttctaatccacttctaccttttcaagtcccagacaccagctaccacatgcaacttcctcattcccattcccacctcaagaaaataaaaatgtaagtctattctgacagccagagagagtagagtagttattcagggggaaatatttttacctttgtggttcttttattaccaaaacaaaaatttaggggtaattggagacagacatgaaacaaccacttaatactactaatactaactttaaccctgacctctgttcttgtctgcatagacttctgcagatccaaatatttcaaggtgatcattatatgagctactaaaaactaaagaatgtagaagtataagttatgtgcctaaattaagaaagaaacaaacaaatttgggagacagaacacaaatttcagctattcccctcaatgttttaaaataaattagcaatagcagttattattaccataacaagtaactttttttgagatggcatttcactgctgcccagattcacctgaaacttctaggttccagttccctcccacattaacctgccatggatctagactactggaacaatccactatgctctaaagacttcctgatttcagcactgtcttttgttgttgctatttgagacaatctctctttgtgaccctacctgtgctagaactcactatgtagacaaggctggtctcaaactcacaaacatccacctgcctctgcagtgctgggattaaaggagtgtgccaccaggctcagccagtactgacctttaaagtgaaatctctgttcttctaggtcattgttaaaaacagaaggaaaccactctgtactgaatgttcagcccagaaatcatatacacacaaacaacactagatagactcagcaactttgtgtgtgtgcgtgcgtgcgtgcgtgtgtgtgtgtgtgtgtgtgtgtgtgtgtgtgtgtgtgtaaaacaataatagtcaaaagagtccatcaatgtgagaggcagtgagaggggcacannnnnnnnnnnnnnnnnnnntgatataattatactttaattaatttttaaaagcagaaaaaataaaattgaaactctttattcttaaaaaaagaggcagtgctgaataattgctgaactacttttctagatatttagtacctaggtaactacaagtgatattcatttctaatcaaccctcaacggatacagaagcttttaaaagtttaaatcatttcttctatattaatggtctgcaaatgacagaaaatggcatctttaaaaagaaaccaattgtgagaaacagatctcaggtgataaacctgatgtcagattgaatttgaacaacataaagtagaaagtgctactggaactttaaggggacaatcggactccaagagagctggggttttctgtcacatgagcctgtttgtcagttgatgtctgcatgaggactatgaggaacccatgtgacactggcctccaggataacaacgtctctgcttaaaaatcttacctagtagtactgaccagtgttacggagataaaaagaaaaacccaattcatcataacctttgcaattcccttcttcatatgcactaagtcatttattatatggatattagctgtacatgtttcttctgtataattttatatatcacagccaggaagaggaagcgttttaaataggaatgtcagacacacacccagatactctctcctttacttactctcttttggcagaaaaaaataatttcaagagcctggcatcagacaactacataaaattaccattagttgtcaccataaacaagtaatgatgaagacatacttcaatccgaatttcctggaagtaagcatggtggccaacacctttaattcaagcacccaataggccgagacaagtgactttgagttcaagtctagcctgagtcacatggcaacaatctcttgaaagaaaataaaaaattctcacggtaaactgtttcttttacttttatgagctgcttaagtcacatttgtcttctatgttttttctacttatttccaaatcaaatttgaattagactacagttactgagagccccttaggagccaagccctgtaagaaactggtaagtaagagggggttgggtagggtagggacagggtggaggaaaaagcatcttctgtcccctactttccaggtcactttcaaaggagcaaaaccatcttgacaaataactcacactgactgtcactactctcactttctcactggtggaaaaaacatgttttaagagtccaagaggggctggtgagatggctcagtgggtaagagcacccaactgttcttccgaaggtcctgagttcaaatcccagcaaccacatggtggctcacaaccatctgtaacaagatctgacgccctcttctggagtgtctgaagacagctacagtgtacttacatataataaataaataaatctttaaaaaaaaaaaagaatccaagagatttggtctgaatgacatggtaaaatcagttttgaacacaggagtgtctggccctctgattccggaggcacctgcacacatgagttggatgtaaattcagccaggcacagacatacatacaaaaatgaaaaagttcttctcaattttcttacctcagctctcttgtctgtctgcactttaaattttactcaccaaataacaaatttcaaaacaattgaactctgactggcaatctaaattttagtaggactgtataagtggagggcacagcttccctataagccttccacagaggtgaggagacaaagtgagccacagagttctaatgcttgcaagcattcaatggctgcccagctgctcctcctctgacattttagtatcttgtttgcttcttcccctgctgacagtcaaaacctgcagctgctgtaaacttgggtgtcctagggccagccctggctggaagcctggagcacctctctctcacgctttaattgaggtcttctgcccactcactcttactcatacccacttttcccatattattgaaacttcagttcttgcctccgtcatgttcaggtttctaggcctgaggaaattaactctttaaaaagccatgtacagtgttcggaaggctctggatatagccggagtagctggaagttacgaatcaatgctggattatttatagtaatgtttgcgatgttcagagtgtgactagagttcatctttcatcgcctgatacttaccatatacctgaattgttctgtgcacaaataatgcagtcttattcacaccaaagcccctatattgtttcacttgctatgcacaaaatcaaacccagagcctcttgagtttattaggcaagagctctaaaactgaagtacatcccaccccaaaccaacaaactaccacagcaacaacaaaaaacaactttttaaaaagctgattataacaaatattcttttgttttgttttgttttgtttgtttttgtttttttggttccattttgtttaagacaaatgctttctttatgcttttttttttttctaaaagaatcttaaaagcttaagtgtcttatatgatcaggaatttatttttatatttaacaataagtctagagaaggttacctcagcctaataatatcattaagaacctagactctggggctacagagtcggctcagtggataagagtactttcagctcctccagctcacaactgtctgtagttctagatctggggggtccaatatcctcttgtggcccccatgtatactgcatgcacatggtgaacatacataatgcaagcaaaatattcaacacaacaaataaaaataaatatttttcagaaaagaacccggactttgggactgatgagactgctcagcaggtaaaggcacttgacagcctacctgagtgctcttctggtggaaggagcaaactgactcggacaagttacctttagacaaatatagactgcttatcattgtgatttttactgtcacagttcagaacgctgtacttcacagaatagaagaggccaggatttggctaatcctatgacttgggtttggaatgttccccagaggtggtggaaccttgaaaaggtggggcctgtggaatgtcttagatcactggattgcatccttaaggagacagctgtcatgaggtgagcagcacctctacatggcagccaggatgtgctgccatgccaaaggccaaacccaccagcatagctaagaatggactgaagcctctacaagtgtcagccaaaacccaaaccaacaaactaccacagcaacaacaaaaaccaacttttaaaaaagctgattataacaaatatttaatttttttgttttttgttttgttttttgttttggttttttggtttttaaagacagggcttctctgtgtagctctggctgttctggaactcactctgtagaccaggctggcctcgaactcagaaatctgcctgcctctgcctcctaagtgctgagattaaaggcgtatgccgccaacaaatattcatttacaggaacagaaagctaactacgaacacagataatttttttttagatctttatttttctattcctagaaatttagcttcagagcatattttccaatctctctctctctcatacacacacacctacctacatgtcaaaatctggaaactatatgttataaattacttttattttattctctcatcaagtaaaataaaagtagaatacttttctaagttgtacttgggggctcatgcctaaaaccccaacactcagaggaggcagaaatagaaacattgttgagttcaaggccagcctgggctcctccatgtagtccaagcgaggctgggctaaagatggagaccctgtatcaaagtatacacaggcacacagatcccaaataaaaactcttttccaatttttctcaaaagtagtatcttcatgtgatgattacattaaaaaaacaaacaaaaaaaaaaaaaccaaacacctcttatgaacacaagctctatgcaggagagtaagctgacaggtagcacacagctgaagagaacggcaaagggaaactactgggatcctcttgctctctcatccctgcctggtatttgtcacctacttacacacaatagtatttgtttgttaagttaactgtatttaaaaccaaataaatacgacctctaggaaacgataaagtggggcatatttagagtctgacaactcaaagtcacacagtgatttctgggaaactcactagccgcagagagcagtcagcagaggaaataagaaaatcccagcacagcctggatgattcatgtggaaatcagaaccattagctaggccttcagacaaatcaatagcttagcatggtctcaagtgaacaatctccaccattctttctctctggtcaaaaagttctaaatctcttaatgaggcggttatcccattaattatgttttttgtctcactggagtcaagcgccagctgcatgtgatgtcactgctcctgaaatccaaagacagcagctacttaggggtgctcactgataacagtgaatgctcacagaagcagttccagggctcttggcaagacttggtattcagaccacattctgagtacactcatctacacaaattcagactaaaaaaagcaatacctaggcaagtcaacacatgagggttttgttttgagaaggcatcccactgtgtaacccaaactggcctcaaattccttaggtgatactcctgactcaggctcctaagtagctagaatggtaaacaggcagatgttttcacatctgaccagaaggcaagagttgtttaaccttaacaagaattactgaagaagctttaatacacaaagccactcaatcacaaatgtgccttgtggagttttgtctttgtgtgtttttgttttgaggcagggacttttagtctggaatcaccttctggtcctcttcctgagtgctgggattacaggtatgtcccattacacctggtttatttagtttggttttatatttatttttaactttaatttttttctttttaatgaatgagttttatagttaaatagacacctattcccatcagtagccccttctaacctcaaactgcagcaatctccctgcctcagtttctcaagcactgtgattacatttttcatgaactcagatgaaacatcccaatctcaatccaacctgttaagttccacacgttttgtgctcagtgctgttgccgttgagacagtgccatgtcctgtagcctaggctgtcttccaactcactgtgtagctacttctagcctcaagcctgtgatcctcctgagccagcctcccagtgctgtcctccatgctttttacacacagcctagtggaggcccagctcccaaagaccagccagacctggatggctctggtggtggtaagcaccacagcaacttccgctcctccacagatctatctggctacacacagcaaacatcaattccagaaggatcacatctcatccaacagaaatgaacatcttttgaaaaactgggtctttcaagacttctggccagtttcctgcacacatttcagttgaaacttgttatgagaaacaaataaaaccaggggactcactgaaacacattataagactccttttcagagattacctgatctcattattgattcaaagattatcctccacattacccttcttctctgctgtattgttctcccttttacccagtcagcctctccaaattgaaaggcaacagctgagagccaggccatcctatattaaagactgacacagtggtgtgaggatcctcgggggtttgttagtcagggatagtctccatagaaggtacatagtacactcgctacttcaccctacaacatggcttccaaaacactggaaaggatcctttgtcctctcaagttagactctgactgtctggccacaccagctgctgatcatctctgtcatgtagagcatctccttttagtaagctgtcatacctggcacactgagatcacaaatgtgtactagtgtacattacagcttccatgatgaaagctttgttttcttttcttctcttttctttttttctttaattttgggggagaggttgcaagggttggggtggatacaaagggatatggaggtgaatgggactggggtacatgatgtgaaattcacaaagaatcaataaaagattttataaaattaaaagaaaaaagaatttttcctgggaaggtgagacccctgtagcttgtgttctaagctctaagtacacgaatgtctttgatgctgatctcaccattacccagtttctatatcattgttattacttactacagatagtgggacatgttagcaaacagccaacctcagtgaaaaccacaactcaaatttttttctacagaacataccaaaacttttggtccccttcagttcatgggtgaactttaaaaaattagaagtacttaacacaggttaagtaatatctgtatcataacaccgtgaatccatttaaaacacttggtaaatcaggcacagggcctcacaactgtaatcctggtactctgggaggatgaagcaggactaccttgagtctgaagcattttcctgatctacattaaatatttattatatttttactactttaaaatatggatgcactatatatgtatatatatggagagagggaaagagggaagagaaggagggagaaggagagggagagggagggagggagaggaggcagaggcagaggcagaggcagaggcagaggcagaggcagaggcagaggcagaggcagaggcagaggcagaggcagaggcagaggcagaggcagaggcagaggcagaggcagaggcagaggcagaggcagaggcagaggcagaggcagaggcagaggcagaggcagaggcagaggcagaggcagaggcagaggctgtgaggagccgccctcacatttgccattataagatggcactgacagctgtgttctaagtggtaaacatagtctgcacacatgcaggggcagttttcccaccatgtgttctgcctttcccgtgatgacaactgggccgatgggctgcagctaatcagggagtaatacatcctaggtggaggataattctccttaaaaagggatggggtttcgccatttgcttgcttgctctcttgctgcttgcttcttgcactctggctcctgaagatgtaagcaataaagctttgccgcagaagattctggtttgttgcgtctttcctggccggtcgtgagaacgcgtctaataacaattggtgccgaaacccgggacgagaaaaaacccgggacgagaagacctgggacgagaaatcctgagacgagaaaacctgggacggttaccaccaccggcgcaaggaagatccgtcattccggaaccagaactgcgggtcacggtaatgaagtgttcccacaacacagactgttaagaaggattcaactgtatgaattcagaacttttcagctggggaacgagagtaccagtgagtatagctttacgaggtaagcctggccttgaactttctaaggaaattcaagacagtctatcagaagtaaagtggaaaatagctttataaggtatgtttggccttgaactttttctagtgttaaaagcccttttgttccttttcacatgttatcaagtggttaaggcagggcggattctagaggaaattcaggacaagctatcagaagtaaagcggggagagagagtaggagcaaagaggaaacatggtgcacaaaataagtatacaggcctttccaagggtcttgaacccgaggaaaagttaaggtcaggtaggaatacctggagagagattagaaggaaaagagggaaaagggaaaagaagaaagatcaattagcggaggtctctaggagaaggagcctgtgctcatcgctggatgggctcggggagctagttcttagtagctctgaatcagataaaaaatttagcttctctgaagaaacagacttggaggaggaaacagctcgttatgagagagaaaagtgccagccagataaaatgcgagctaatcggtcaaggaaaaagccaaaagcggctggcaaaggccagcttgctgcttggcctcttggcagtcggcttcaaggtcatagtgcacctccaccctatgctgagcccccgccctgcgtagtgcatcagccctgcgcagagaggcaatggacagagaggcaatgcacaggctcgttcattccaaaggaggaacaaaggaaaatacaacaggcatttccggtctttgaaggagccgagggtgggcgtgtccacgctccggtagcgtatatacagattaaagagcttgccgagtcggtccgtaactatggagtcagtgctaatttcactatagcacaagtggaaaggcttgcgaatcacgctatgactcctggtgattggcagacggtagtaaaagctgtagcccccagtatgggaatgtatcttgagtggaaagccttgtggcaggactcctgccagacgcaggcaagggccaatgccaccatgaaaggggatcagagaacgtggacttttgaattacttacaggtcagggacaacacgctgctaaccagacaaattatcattggggagcatatgctcagatctcagctgctgctgttaaggcatggaaagcactacctaagaagggagaggcaagtgggcagttgaccaagattactcaaggtgcacaagagtccttctcagattttgtggccagaatgacagaggcagcagggcgtatttttggagattcagagcaagccgcacctctggtagaacaactcatttatgagcaagccacgcaggaatgccgagcagccatagccccaagaaagaacaannnnnnnnnnnnnnnnnnnnccaatgcaggcttagcggctgccatccttcaatcccaaaaatgctccatgggcagaaatgatcggagtacatgttttaattgcagtaagcctgggcatcttaagaaagattgcagagctccagataaacaggggggaactctcactctttgctctaagtgtggcaagggttatcatagagctgaccagtgtcgctctgtgagggatataaagggcagaattcttcccccacctgatagtcaatcagcttatgtgccaaaaaacgggtcatcgggccctcggtcccagggccctcaaagatatgggaaccggtttgtcaggacccaggaagcagtcagagaggcgacccaggaagacccacaagggtggacttgcgtgccgcctccgacttcctattaatgcctcaaatgagtattcagccggtgccagtggagcctataccatccttgcccccgggaaccatgggccttattctcggccggggttcactcaccttgcagggcttagtagtccaccctggagttatggattgtcaacattcccctgaaatacaggtcctgtgctcaagccataagggcgttttttctattagtaaaggagataggatagctcagctgctgctcctccctgataataccagggagaaatttgcaggacttgagataaagaaaatgggctcctccagaaatgattctgcctatttggttgtatctttaaatgatagacctaagctccgccttaagatcaatggaaaagagtttgaaggcatccttgataccggagcagataaaagtataatctctacacattggtggcccaaagcatggcccaccacagagtcatctcattcattacagggcctaggatatcaatcatgtcccactataagctccattgccttgacgtgggaatcctctgaagggcagcaagggaaattcataccttatgtgctcccactcccggttaacctctggggaagggatattatgcagcatttgggccttattttgtccaatgaaaacgccccatcgggagggtattcaactaaagcaaaaaatatcatggcaaagatgggttataaagaaggaaaagggttaggacatcaagaacagggaaggatagagcctatcttacctaatggaaaccaagacagacagggtctgggttttccatagcggccattggggcagcacgacccataccatggaaaacaggggacccagtgtgggttcctcaatggcacctatcctctgaaaaactagaagctgtgattcaactggtagaggaacaattaaaattaggccatattgaaccctctacctcaccttggaatactccaatttttgtaattaagaaaaagtcaggaaagtggagactgctccatgacctcagagccattaatgagcaaatgaacttatttggcccagtacagagaggtctcatgctggttaatcaactcatagatcttgtccagatacaactagatgtattatgacaaataactcagctgggatgtgaataaaagtttccgggattgtgcgttacttccattcagtatgagaaatttactagggcagctaatttgtcaaaaagtctttttcagtatatgttacagaattggatggctgaatttgaacagacccttcgggaattgagacttgccatcattcaggtcaactccaagcgcttggacctgtccctgatcaaaggattacccaattggatctcctcagcattttccttctttaaagaatgggtgggggtgagattatttggagatacacttcgctgtggattagtgttgcttctttggttggtctgtaagcttaaggcccaaactaggagagacaaggtggttattgcccaggcgcttgcaggactagaacatggtgcttcccctgatatatagttatctatgcttaagcaataggtcgctggccactcagctcttatatcccatgaggctagtctcattgcacgggatagagtgagtgtgcttcagcagcccgagagagttgcaaggctaagcactgcagtagaaaggctctgcggcacatatgagcctattctagggagacatgtcatctttcaagaaggttgagtgttcaagtgtccttcccccaggaaaaacaacacgggaccagaccaggacccctctgggtgatgagcctgggaggaggttatgtgtacggctcctttacctgcacactggggatttgacctctatctccactctcattaatatgggtggcctattgctcttattaaaagaaaagggggatctgtgaggagctgccctcacatttgccattataagatggcactgacagctgtgttctaagtggtaaacatagtctgcacacatgcaggggcagttttcccaccatgtgttctgcctttcccgtgatgacaactgggccgatgggctgcagctaatcagggagtaatacatcctaggtggaggataattctccttaaaaagggatggggtttcgccatttgcttgcttgctctcttgctgcttgcttcttgcactctggctcctgaagatgtaagcaataaagctttgccgcagaagattctggtttgttgcgtctttcctggccggtcgtgagaacgcgtctaataacaagaggcagaggcagaggcagaggcagaggcagaggcagaggcagaggcagaggcagaggcagaggcagaggcagaggcagaggcagaggcagaggcagaggcagaggcagaggcagaggcagaggcagaggcagaggcagaggcagaggcagaggcagaggcagaggcagaggcagaggcagaggcagaggcagaggcagaggcagaggcagaggcagaggcagaggcagaggcagaggcagaggcagaggcagaggcagaggcagaggcagaggcagaggcagaggcagaggcagaggcagaggcagaggcagaggcagaggcagaggcagaggcagaggcagaggcagaggcagaggcagaggcagagaggcagaggcagtctttggctcagtctgatctcaaattccctatgcaggtgagaataaccttgaacttctgatagtctcgtgctgcccttccccagcacgtgctgggattgtgaatttatggattcataaatatactgagtttatgaaggactgggatcaaacccatagctccatgcatactaggcaagcattctgccaactaagctatactgagcccttaaatatattttatgagaatgtattccaaagtaattttgcaagtcatttcctttactatttcatacctattaatagcagaagtaatagatacttctcaattatcctttaatataaagaaagcagttttcctagttgtcattaaaaatagaaaaataattactaggtcactactaggtgctaggtctcctcacatactctactagtgaagtgacatagtaaggatatccggggcagcaggcattgtccttcacacctacaatcctagcatttggagggtgagacaagaagattagtctgggctacagtgtgattgatggcctgagttcaattaccagaatccagaacccatatggcagcttacaatcatctgtaactccagttccagaggatccaacaccttcttctgatctccaaaggcaccagacatacatgtgatacacatccatacatccaggcaaaacactaacacacatttttaaaaatgaatgaataaataaataaatctacaatgctggcactgtagcacacatgttaataaccctaatgctggctaggggagacaggcggatccatgtgggcctgctggtctgccagccaagcctaattgcggagtttcaggtcagggagaccctgtctcaaaatataagatggacagcccccaaggagcaacatttccaaggttgttctctagcctccatacatacacatatacacacatatacatgtacacatacagacataaatacatacatgcacaccaacatacatataataaatatgaaaaaaattgaagtagagaaaacgtaagtaactggcttaaagaaattaatagcaaaaaaaaaaaaaaaaaaaaaggagggcagcagggctggagagatggctcagctgtttaagagtactggctactattgcaaaggaccctgggttgagtcccagtactgacatggcagctcacagcagtctacaactagtactctcttctgacccctatgggcaccaagcatggacagagtaaacagacatacatacaggcagaacactcatacacataaaacgttaaataaaaaaagaaagaagaaattgaaggaggaagatagcaaaactaggatttagtcatgggtgtgtccacgccttagttgctatgatacacggccactttttcagggaaaagagatgagtcaaagtcaaggaagaaaacactcataacaaagctagactgtctggcttttgaggaacactaacaaagttaagagttgcttggaaactctaacaaggaccagtagaatctttctttttaaaaattcactgttttaggtaagccaggtgtgataaagcaagcctttaatttcactcttggaaggtagaggcagaggcagaggcagaggcagaggctgacacaagttcaggcccagccccatctacacagtgggtttcaggctagccagggctatatagcaagactttatctcaaaaacaccaaaaagtattgataactaaattttaaaaagtttacatataaataagccagataaagaagcatgttctccctcacatgaagaactaacaccacgtgatctgagagagtagggagtagttaccagagattgggaaaggtgggcagaagagaatggaaaacaagtttggttttgttgagtgtactctaccactaaccttcattcccacatctttgctccttctctcctattgcccccacccccaccccaccccaccccaaacaatctctcattcttagagccaggctggaccagaatttactatgtagcccaaattggtctccatcttgtgacaatcctcttgtcttggcctccagagtgttatgagtacagccatatgcctaccacacccatatattcagcacatccttttaaatttttttgattttgagaaagtctcagctaatgcagcttgggcgagtcttaaattcactctagagccaggtagaccttgattttgcaatcctgttatagcttcctaagcaaatggcattgcaggcttactgcaaccaggtatagcaaagaactttttaaaaaggctatctggaaacaaaaacaaaaacaaaaaaacaaaacaaaacaaacaaacaaacaaaactatctagaccataacaagaccacagaaaacagtaatcattatagaataactattttgccagagccatgcatttgtccaagtcatttttttacaaaaagatttatttattttatatatgtgagtaccctgtcactgtcttcagacacaccagaagagggcattgnnnnnnnnnnnnnnnnnnnnnnnnnnnnnnnnnnnnnnnnnnnnnnnnnnnnnnnnnnnnnnnnnnnnnnnnnnnnnnnnnnnnnnnnnnnnnnnnnnnnnnnnnnnnnnnnnnnnnnnnnnnnnnnnnnnnnnnnnnnnnnnnnnnnnnnnnnnnnnnnnnnnnnnnnnnnnnnnnnnnnnnnnnnnnnnnnnnnnnnnnnnnnnnnnnnnnnnnnnnnnnnnnnnnnnnnnnnnnnnnnnnnnnnnnnnnnnnnnnnnnnnnnnnnnnnnnnnnnnnnnnnnnnnnnnnnnnnnnnnnnnnnaaaacccaaaaaaaaaaaaaaaaaaaaaaaaaaaaaaaaaaaaaaattctatttcaatttttctctctccccaaaattcttcaaagattaaggaaatgtggaaagcaagatttttttttttttttttatggcactaaaaagaaagtaagctgggacctttaatcccagtgttcagaggcagggagaatctctttgagtttgaggccagcctggtttaaaatagcaagttttaagccagtcagggctacagagtgaggttctgtttctgtttttgtttttaaagaaagtaagtactttaggtttccagaaggttaagttttttaaataagttcatatttttcactgaggagaatttctcaaaataaaatataggtactgaaatcatcttccaaaagtgggacatctagttaccctattcttgaggtaatatacatacaaggtgctatttttaaagatgaatgtgaatgcactaccccatatataaatgccaattctcaccaaggaaacttggattctgaaattgtctaaaactgactcacaagcaaagatttatggataaagctgccctttgtagcaacttacttcaaacagtgaaatggacctgcagaataaaaatcatggtactttcagatgttgaaatacatattaaagtttttctgtaagtatttatgatacaaaaattataacacatattgtttttgaaaatcattaagaagttattaaaatggttttaaaatcattgttaactgcaataagagtataactcagtgaatgcctaacatatacaaggccctatatctgatttttagcgtcacacaaaaaacgttgactgtggtaatcttaatggtatttaactttcatcctttgaatattataaattatctaaagtgtatcttcccctctttttcttttcttctctttttgttgttgttgttgccttttttgagatagagaactcgctctctaactcaggctgacttctaactcacaaagatccactggcctctccctccccagttctaggactacagtgtatcttttattcttttcaggggaggaggagatcagtgctagaaactgggcttagggcttcacacatggtagccaacaccgggaccctggcttcatctccacctttttcatgtgctttactttatgacagcgtctcaccagttgcccagcatgacttgaactgcctcagcttgtcaagtggctagaactacaggctagataacaagattgagggcaatctggactacgtgagattctgtttcaaaataaaaagggaggactgggtagatggctcagtggttaagagcactgactgctcttccagaggtcctgagttcaatccccagcaaccacatggtggctcacaactgtatgagggagaataatgtgtgcaaggacatgaagaaagtaagaggaaatgtccaatgctgaggaaatacagcagaaaaaaatagcatgaaagggaacatccaactcatcccatcttcacacagatggggtaaaggatagcctcacattgtaagtttttgacatgctattactaattttgcttctgtaggttttccatagctttattttgtaacttcaagatgattctctagggtaatataactagtactgtcttggttaggtaaaaaacatttccatttcactcaatcaccactatttttgttgatctattcatagatgacattgattgagggtgattattcattttgcctagccagcactattccttctgatgggaaatggctctcagccatcccctaaggtcatagtgggactatcaataataatgcctgtcctctgtcaagcctccaggcaagtataaacttgatcactcatggtattcctcccacactgccaatggggtattgtgaaaggaaagggcatatgactccaagaaagggcaagaacttctctatcaggctttctttctccaggcccagagctgtacaatcatgtgatctgcagatgctactctctagtcactctgaaaccagctgtcctaaagatgaaaacactgtcagacagtacatgagacccagggaaacacagtctcctgagccctgagtcaagccatgctgaaactttcaggtcacacaagcaattaaatccctttctggctttgaataggttttctctttcttccaactaaatgaacactatagggctaaagagatggctcagaggtaaagtgctcctactgctcttacagagggcctaggttcaattcccagcacctatatcaagtgactccagttccagggaatccaatgccctctaacatccaagaatatttgtgcatacattgttcatataagcttgagtacacgtatgcacacgcgcacacacacacacacacacacacacacacacacacacacacacacgagtaaatctttaaatcaattctagctggttaattgcttaactctgtttaactctgtcaaagaaacatttggtaatttcattgttagaaatggctcagcagttatgaacactgtctgctcttccaggtcctgagttcaattcccagcaaccacatggtggctcacaaccatctgtaatgggatccaatgccctcttctggcatgcagatgtacatgcagatagagcactcatatacataaaataaataaataatcttaaaaaagaaaaagaactatcattcatggactacccaggctctaacttatatactacaactaagctgatatcataacttcaggtattctattatataaataatgtttacaataggaactcacttaaaattatacacattatttcaagttctaataagctaacagctactaaactgagatgttacaaactttgtttttaatttctttaaaaaaatactgctacatttatttatttgtgtgagtgcatgtatgtacatgtcagagagtgtatgtagaggtccatgcacaacttgagggattcagttctctattctaccatgtaggtcctggggatcaagctcagcttgacagctcagtggcaagtgcccttacccactgaactatcctgctggccaaacttctactattcttgatgtttaatactctatcatgtttccagatcaactgtatttttcaagttttatctctcttaaatgtgtagcctctttcctggtctaatcattctattctgaaaatcttcttgttttggtatacagttgtcaaggaacaaatcacatcaaggcatggtagttcatatgtctaattccgaaatttaggaagaggctaaggcagaaggattcctatgagtttgaggccagtttaggacaaaaagtccagagcagtctgggctgcagagtaagaaaaccctgaagagacagtgtgtgtgtgtgtgtgtgtgtgtgtgtgtgtgtgtgtgtgtgttcattcttcattgctcctctagtttcactttatttaaaaagctaagatttgaacaactagtcgaggattggcaagtcttactagagttagaacacctctgtaatctttgagctactgaaccttcacgatttaagagacagtgacaaatttcaagagccacataatcactttgctttgctcaagcaattcaaattattctgagtaattttccatttgcagtctctaggaacagcttctggttcctaggtggagctcgcatcatgcccttatcctatctaattcttcacagagacttgtctctcgggtttattccccagcttaaacaccttctttctgtactacctcagcatagcacacctccgtaattttcatttcaattcctgacatagctttccttttggtcttcctggctctcagctctcctctctatggttcgttttcttcaaaatgccttattatgtgtttacatctttagtcaccttcttataatttcctttttaatttttctcagatagggtcttgttacatagctcaagccatccttgaacttatggtaatcctttgccttccatgtgctaggctcacaggagtgcatcagtacacctgatccatgtcattattttcagtccataccttctcctgcttaagtatcactcactcgttacttaacaaacaagaactgaacaaaatagcatctcagaggtttctagtggtatgagagtgctaagacacattcaccataactacgggaagatggaaatgtattcagatcatcgagacatagaaacaaaaaaaaagatgatactagccatggttcagaatctgaagagctggatgtcacatcaaatcagaattggtaaagaagaaaaatataaaagtcaagggaaaggatgctgaggttcctaactcatgaagctggaagaaaaatccactggcaagatagggacatcagaaggaaaaaggcatagaaggagcataactgaaggatgcttgccaaactgcagatgagaacacatgatcagataatggatttcaacaataaaatatgagaatctccaggaatggtgttttgagggacaatgctattgaatatcaaactgaactataccagaaaacagatgcacacacatacatgcactcaggaaacactcaggtgtttccaggttaaatggcttcagtaggtacataagaaaacatggaaaaggcaaatatagcagcaatatgcaatctactgccctacaaagctattttcctctgggaatattttaatggctttggagtttcagcctgatccttttctttcctataatacttagcatctttatgtatcaccaggaattttaatcaaacagctttaggtacccttgtctattctacagcatccatatgctatcaatgatatatatggactatttatatacaattaattaacttgctgcacgtgatccttccaggtctcactgacaaactttgttccacaagtgctagatctctgaagctattaaaagcatcaatagatgagcttgccaaatagacagccactgttaagtcaagactagcaactctctccagagtttttaggtggaccttaaatcacacaacccagtgattatattaagactactaagccagatattctatattggtgaattgtacagtataaaataactcaataatgctgtaattaaaaaacaaaatagacctttagcaaccctacctgaaaaatcaacaaatatgttttaaccaaaatgtcagtctcaagaaacattatatccaggcactaagctatttctcttaaatatttaaatctctggaaatttttatgaaatggaaaccctgctaaattgctatgtcaaaaccattatcattctaacttaagaaaataaattgaacagtcccatgcccttcactgtaatagaagctgatctgtatcacacatcaaaatctgccttaaaggtctgatgacaacttttaaaagggcacttttcatatttactcacatgctgaatatcacaattatgccatgtcagtaacatgtttttccttgtaatctatccaccacttccttctctacaatcatctgcaagggacagacacttgggttatactgacatttcttctaatggtttccttccctctcctaatacttactactctagaatcattcctctagaataagtccaacctttgccatatccagacatcacctatgtcctgctaacacatctgccagcctgttgttaaggtaacagcaggttatttatgcctttggagattcaaagtgggtcaagaatataataaacagactgtgagccctatgaggaaagggctatgacttgtccactgttagaaactctaaacacaagacagagtatttggtttacaggacactcaataaatattccttcctgtcattaaactaaggcccattcacagatcagtgcacaaataactacagagtcaggctattctgaggtatatctaaatttaggaaaaagccccttaagtcccaacctcagtttcagtgactaaatctgtctgtatctaggaagactataagatgaattctattacactgtgatggaaactcaaaactttattatttaaaaatgacaacaccttccccagttttccctacaaaatattttgtgtgggggcaggggacaaacagatctagaagtccagcaacttaccacccacctaatttctgcttatcagcctataattagcaggtccaggttcaagatgggctgatagcaggggcctggtagggggccagacaggacagaacaatgtaacaatgtgacagctcgtcacagtgacataattgttacttgtatctacttcatacataaattgcaacgattaaatgagttaatatttcaaaacacttagaattgtactatgtaagttaagaaggtaacttttagtcaatttccaatgatagtcttatagaattgccatgctgaaaaaaaaaaattactaggtttagagaaatgttctaattgtacacttcttaaatctagggctagaaagaaagtcccaggttcatgcaagctcttcatttcatggctggaagaaagtaatcatatacctcatatttgtttaaaaaaaaaaagagtcacagaaagctttcacaactagtattaaatgtgatcctcacaacagcttgtaaggaaggacaaaaggacaaataaaattcactctatttacaagtaagaaacctgaaccagagaggttatgtagtttgccaaatgtcacacagttgggtggaaaggtacagatttctttcctcaaggctgcaatttgggctctgggcttattgatgtcacgtgtgcaagagatgattccaaactgctaaaagaagagtccagaaagctggggctatctatatatagctcagttgtaaagggtttacctagtatgcatgaggcccttacattcaatctccgtgcctgagagggagacaaaggcagagacagagagagacgggaagaaagagattctggtaaaaatgtaaaaacatgaacttgaaaagttaaggcaattctgttgagtggaattagaggtaattttaataatcattagctggcaaaacatccattgaaaccgtaacataagataccatgaatgcatacaccacacactgcccaacacagattttctaaacagtctctccaaaatacgccattcagagattaccagaccctgagaatatgggcgtcggtttaagattgaaaaggctgccacttcccctaaatgaagaccaaaagggaaaggctcgccggaaaggagggtgaggacacagagctaacgaggctctcggggataacgcgcaggttgcaaactcccaggcaccaagaagcctaagaataagctcgccatctccgggctgcatcttcccacaggctccgcaccccagggcaaatggcaagaacccggcagctaaaggtgaaagcggactggccataactgcagaatccgaaataatctccccgagaggctgctgcctggcgcataccggcacaggacgttattttaagcacgagtcccgggagagcggcccgagcatctgcccaagagcatcccatccgaaatgggctcgggaggcagagcagggaggtacagccgggcaaggaggtacagccgggcagtggggtgcagtccggtggaacctgccggtcctacagccacggtcccggccgcgcgacccctccccaggacaaggctctgcggcgcgcgttaccttggtgtagagctcggannnnnnnnnnnnnnnnnnnnnnnnnnnnnnnnnnnnnnnnnnnnnnnnnnnnnnnnnnnnnnnnnnnnnnnnnnnnnnnnnnnnnnnnnnnnnnnnnnnnnnnnnnnnnnnnnnnnnnnnnnnnnnnnnnnnnnnnnnnnnnnnnnnnnnnnnnnnnnnnnnnnnnnnnnnnnnnnnnnnnnnnnnnnnnnnnnnnnnnnnnnnnnnnnnnnnnnnnnnnnnnnnnnnnnnnnnnnnnnnnnnnnnnnnnnnnnnnnnnnnnnnnnnnnnnnnnnnnnnnnnnnnnnnnnnnnnnnnnnnnnnnnnnnnnnnnnnnnnnnnnnnnnnnnnnnnnnnnnnnnnnnnnngtggcggccgcccgcgcgggtgaaacggtggcgggcggggagcaggggaagggccgggccgggcagggcgggccaagctggcgggcgggcccgggcgggccggggcggggcgcgtcaggcgctagcggcgggcgggagcctgacagtcatcacctccagggctcggcggccgcgtgagcccgaggcgcgtgctcgggggactcgggtaccagcctccgcggccgtcgccgcctcagtctccccaagccgcctggtccacacacacagcccttgcggtctcttcagtcgcctcgcgtcctcagcgccccctcgctccctcagtttcctcagccgcttcgcctccttagaggcctggtctctgtagcctcctctgtctcctccgcggcgcgcgatgccgccgccgccgccgccgccgccctgtgcattgtgggagcgggaggaggctgcgctcgagcgctgccaccgcgatccctcccggctctttcgggctcacgctgcctcccatcggcggcgggcaccgagcatcctcggcccatgcggctggcatcccaaacctgctttggcggagtggccccccacagtgtgcgcgaaggtagggcagtgagggagcgcgtcccgctcgaggtagcgacggttagagtgcccgcgtagacccggcagcctcaaggctgctcctcctggccctgctgtttgtagggagaggacttgaggtaggggagggttcgggaaaggcctttctgagaacctgcaactccagaagagacttgctcacggcagggcgggaagctgcaccacccggaatttgaaggatgctcaaggtcactctgcatttgggtttgcacccttggtgatgcaaggacatagggtggcctctaacacacagaaactccaatgaacctgaaaacaagatggcactgggaaatggcccatcttagacttgggcgtttacataggttcgccaccattcagaatgagacctttgttctgctgatcgtgacagcactacctgatgctgatcctggagtcacctgaaaacggcaacctactgagagaaactcaagtgtttgcagtcttgacgcagtctattccgtgcccttacacggacacaggaatgtggtctttttcatcccaacatgttctctccagccacactttcgtgctcacttggaatactctttaaaatttttagccttttaaaatgtgtccatcttccttctttaaaccttaagttgtggccagtgcctatcatgggaatccagttttattgtttggcttgttgggttttgagacaggtctcactaagcagcccgggttttcttcaaactcgccatcctcctgcctctgccttgtgaatggtgaaattttagagacatggttctgagaccagtacaatggcagtcaaagcacaagcctgactccctagttatgtctgaacatgaggtgggtatttgaaggaagactgttcaccactttgatgtttctggattccatcctttctttgtctgcctgtgaaaggagacaaaatgtactttgagccagcagagcatccaaagcaatgagttgagctcctgtctcttacacttccttcatgcctgtagaaggtgcctgtttccttaccctctagatattagctaccggtcaggacagttgaggaatactgagtatgatgggttggtgagtcggaggggggggggggggtaggaaaaaccaaaacactcaaaactctgagagttcttataaaagtgacttttatttacatgaacaaaaataaaattggaatcattctttcaaaattttcaaagacatactttcaaccaccctgatgtaagagaaagagaagatgaggggtaggagaaagggttttttttcttttggtggtggtggtggtaaagtctctttatgtagctgacctagaacaattttacctctctcccttgagtcccaggagtgctgaaattgcagatgcatgccaccacatacacttgggaaatgggtttctgaccactaacctcttgcttcattcaggaaaagaacagactttaaacaaaacacacccaaccggcaatgaggagagggccattctgatggtggactcttctgcctaatgcatatgtatttacagcctaaagcactcttattactaagatctgcaaaccaggagtagggtccacaccccaaaagtcagtataaggtattatatattttattgtaaattgataaaattttcagttgttgctttataaattaagaacattttctcaacagaggaatggatatagaacatgtggtacatttacacaatggagtactactcagctattaaaaagaatgaatttatgaaattcctaggcaaatggatggacctagagggcatcatgctaagtgaggtaacccaatcacaaaagaactaacacaatatgtactcactgataagtggatattagcccagaaatttagaatatccaagatataagatacaatttgctaaatgcatgaaactcaagaagaatgaagaccaaagtgtggacactttgccccttcttagaattgggaacaaaacacccatgaaaggagttacagagacaaagtttggagctgagacaaaaggatggaccatctagagactgccatatccggggatccatcccataatcagcttccaaacactgacaccattgcatacactagtaagattttgctgaaaggacccagatatggctgtctcttgtgagactatgccggggcctggcaaacacagaagtggatgctcacagtcagctattggatggatcacaaggcccccaatggaggagctagagaaaatacccaaggagctaaagggatctgcaaccctataggtggaacaacattatgaactaaccagtacctcccagagctcttgtctctagctgcatatgaatcagaagatggcctagtaggccatcagtggaaagagaggcccattggtcaagcaaactttataagcctcagtacaagggaacgccagggccaagaagtgggagtgggtgggtgggggagtgcgtgggggagcagtggaggactttgggatagcattggaaatgtaaatgaaataaatacccaatttaaaaaaaaaacattttcttgtaagttgtttttcaaatgnnnnnnnnnnnnnnnnnnnnggggggcttttcctccaaagttcaggtgccctttgattttcttttgttttgtttttgttttttaacttaaatgagtcatatcctgacaaaccaattatgaattagaaactattaatttgaggtgtgcttaatggtcctaacatgctgaatagccatggcgtagcttagcctcatctaccctaaacctgctcaaaacaattaaattagcctgttgttgtacaaagttatctaacacaaagtccagctagtgatagtggtgaataacttaagtaatttattgcacacttgtccaaagaaaatgctggcaacatagtatagtgcagtgtagagtatctgtcattcaccttgatggtagcatggctgactggaagctacagcttactgccactgtctagcaacacaaaacagtatattactgacgatcagtaggttgaaaacaattttttttcaaaaattcagggctagagagatgagtcaatggttaagacaattggctgctagttcaattcatgtgggttcaattcccagcacccaactggtggctaacaattgtctgtgactccaattctagggaatttgataccctcttctggattccatgggtaccaggcacacagacatacaggcaagtaaaacacccataaaatgactaagtataaagatctttcaaaagttctgggctggggtggtaggtagtgttataacacttgctgagccctgggtgaagccctgggttccagtccagtactactgaagatgtgttaggaaagaaaaaaagagtacagttctactgaatatatgccacttttataccattgtaaattcaaaaagttgaaccattacaagtcaaggactagtatctatctgtctgtctgtctgtctgtctgtctgtctgtctatacatatatacatatatacatacaatatatacatatatatgtatatccatatgtattcatgaatactactgttatcagcgactgttcagagatacagtatacaagacattacatgttgaggattcctgtgaaaactctctgtaaacactcatgggtttagattcttattagggagacaaaaaaagctagaaggtgttaagtgtatatattccctggcttgagtaatagaaatagtatgaaatgtgcttcaacagtggagatgtatcatctcagttgtggaactggaggacccagagtaaggtctcagaacaagggtccttctgtggactatgagagacagtgtatccatgtttctctcctggcttctggaatcttgttcactttttttttttctttttctctttttagacccagatccttcttatatagagaggctggctggcctggaaccactccttatacctcagtgctaaaattacaggcatgtgccactacagcactgtcttacaaagtaataatcctagttctctaggcatggcctaattctagagcagaaacaaagtgctagttactagttaccgaacattagtcagtgttcacatctatcccaatttgtaatgtttctgaaggctgggtccggggcagaggtgaagtttgggtgagtgaagaggtcctgatcatttatccctgatagaaggacagacagaggaatggaacactgatgtagaaaagcatctctatttttatactacagtcctatctctgaggaggcacaggcagaagcaggaggatccttgcaagttcaaggccagccaaggctgcatttgtttgtttgtttgttttgttttttgttttctgagacagggtttctctgcatagccctggctgtcctggaactcactttgtagaccaggctggcctcgaactcagaaatccacctgcctctgcctcccaagtgctgggattaaaggcgtgtgccaccaccgcctaaagaggtagactagctaagctatgtttgttttggtttgggagcatttcattttgaacacattttccaggcttatcttgtatttatttcctctccatctctccaaaatgcctggcctccttttattcaagaatgtgtggcttgttactactgtggtatttagcttgtagactcttagctacatcaaggaaataagtatgtatcctaattgatacatgcatacttgcctgtaaataccttttaatgtagcttcttgcatctatgttaagtcaatcctaaattcacattgtatgaagttcatctatataggaacatagatgatcctattcaacttgtcttccttcttataaaccccattcaaatagtgaggagcccacacttatttatatagagccttcctttgcagcctagactgtctttcaatgcatagcaatcctcctttagcttgcctcctgttaggattatcggcattcactaacatgcttaccttgaccctcttttttttactttcattggttggttggttggttggttggttggttggttggttgactactaggcacatgtgaaggtcagaggacaacttgagggaacggatctctcttccaccatgtgggtccttggggtgggattcaggtcatcaggcttggcagcaagcacctttacctgctgagccatctcaccagtttccataacccccaccccgctggagaatagtgtatattgttgttaagaagttcaaataaggtaagtgaaaaagtgttttgacgagttggagagccaggtatggcagtgcatgcttataatctgagtacgtgatagagatgaagaggattaggagttggaggccagcctgagctgcatgaaaacctggagtgggggcagctggggcaaagtacatgcctaacattcttgaagccctgggtttgattcccagcactgtgtataaactgaccgttgatttggtgtgactgtattataatcattgacattaatttggttttggttggttggttggtgtggttggttagagacaagatctctcacagtctatcctggctccaaactcactttgtagatgaagatggttttgaactcccgattctcttgcctccacctcctcagtgctgagattccaggtgtctagccccataactagcttcaactcaatattatcacctgacagacaacgctgatgtactgtactgtgaaaataaacacacaagactttgaagctacctaggtcatctgtttgcggaatgcacagcaacagagtcgggcaacttttgggacaggagcggttacatccaagtcaggctcccagcttttgttcggcaggagctatagtagcaggggcacagcagcttttcccactaagcagcagctgctgacgcatgcttatggggctgttcctaggctgacattaagcctggatctccagcctttctaacagttttgtaagtcatctgatataacgctcttgataaatccttttcactgcttacatgactctgaatgttatccttatgattaagaactgtgaccatttagagtgatacagcaagactgaacggaagtggctacactctcaagagtacagtttctttcagaaaatatttattaggtaagcactatggccaggcattgggccaagtgctaaggcaaaataataagcattctgactgtaaggaggtcgactgagggaagtttcttcagtgcattgtgattaagtggtaaaacagtgtgatgtggaaatcaattgtgcctccggatgaaaggatgaacacaatgtgggggagggaacacagttccctacagatgagttaagtgctgcagcaaatttaagaacaggtaccccagctaagaaaaccaggctaggaaaagatatctattatacatagagctcaaatagtttttaagatttattttcatttgtgtgtatgtgtgtatgatgtgtgtatgtatgtatgtgtgtctgtatgtgtactatgtgggtgtaggtgtatgagggagccaaaagagggtttcagatcccctatatctggagatacaggcaattgtaagtctcccaacatggatgctgggaaccaaacttgggctcactagaagagctgcaaaaactgtaaactgctgagctgcctctccagcgccccccccccccccaaaaaaaaaaccctcctgaaagattgcctggaatccacagaacccagaaaatggtggattcagctcaggatagcagccaactctgaaataacggctggacaataggataagaaagaaacaaacttggaagagagaagaaacatccaggggagagttgtctggagcagaacgattttataggtacttgatatgcactaagcgcaaataattctagctatactctagatcaaatatacaaggaaagaaaaaccctgaaaaactcccaggaaaaaaggcaatggtggcacatgtctttaatcccagcactggagaggcaggaggcagacacagaggcatctctatgagttcaaggtcagcctggtctacagagcaattcacaggctaaccaggactacccagagaaatcctgtctggaaaacaaaaaaataaaataaaaataaaagtaaaaaggctcacaaggaaatgtagtctgtggtctgcagtgaactctacagagttagagaaactgctagtgatttcagactataatgaatgtgtgataatggaactataaagacagatggcaaaaactgagagagaagagtcagaagggaaaataaagatgttgattgtgagccaggtatgtggcttgggcctataattttaggaaatctaaggcagggggattgctaaaagttttgaaaccagcctgagctacataatgagttgtagaccagcctggactatataacaaaaccctgttgcgtaagtaaaacagggctgatggaggttggcaggtgcttttctagcatgcacaaagtctcgagtatgacccttagaatcacacagtcaggtgtggtaaaacacgcctctatcccagtacttggaaggagaaggcaggcaggaccagaatcctgcttagagtcaggttaggaagacggctgagacgtaacgtacctgctacacaagcatgaagacctaagtttggattcagagcacacataaaaagccaggtgttgtggcacatgtttgttggccttgcactggggagaggagggactgacaaagatatacagagcctgggagctcattggccacccggtctagccagttgataaactccagtttcagactcataaaatgtgacgagtaatagaagattttggtctctgtatgtacacacacacatacacacacacacacacacacacacacttcatggtcatcctaggcaacataggaagttcaagataagctttgggatacatgagacttgtctcaaaaatattaatcttgttattatacccagtagagaatcaagaaatactgtccacagtaaatgaaattggtcattcaaaaaggggcaagtccatcactaagcatagcaaagaagtttgtaaaagaatcaaaggcagtgtgatagtatgccagacatggatcgcacagctgcagtttcagcagttattttgtctgtataatttattactgttagtggtgatgggggtacagtggtccacatgcagaggttggagaacaattttatagaatcagttctatccatctattttttatgtgtttcttctggagatgagactctggttggcaaatgtacaggacaagcatctttacttgctattgtgctgcccctagatttttaaaattaattaaattaattttgagaaaaggtctatgtaggcctggtttacatcaaacttgggggccatcatttgcctctgcctcttgagggctgggattaaaggtgtgtaccatcgccactggcactctcagcacttacaaaactgagacaagaggatcccaaatttgaagctagttgagttaccaagtaaggtccagttggtggaggaggagggagaggggggtggtagaagaagagacaatattttgatatttgggtccaacttctggcaggaccccacagagaaatcaccctggctgtggacaaactgagaagccaaaatgctttttaaaaacaaaatcccaataatttggttttaccaagtgaagagtcaggacctggggtgaaagcctactaattcaagagaggcaaagcacctagttgaccttccttaagccatgtcccagaaggaaaaagccagttctccacactgtcttaaaaacccttccaattgacctcctcttactctccgtatttttctatgctcattcccagtcaagtggttgcttggcccacctcttggtctatgattgactttattcagtctcctttacagtaaacagaaaggttatgtgagactcgcaatttaaaaatcagtgttgctggatacggagtcactcaactacccaggatcctgaaggcggcaccaaggaaaagcgattagcagctcagtttataccaaaattctttaagcattttccagagctggctgattctgctatcaatgcacagttagacctctgtgaggatgaagatgtgtcaatacgacgtcaagcaattaaagagctgcctcagtttgccacaggagaaaaccttcctagagtagcagatatactgacccagcttctgcagacagatgactctgcagaatttaacctggtgaacaatgctctgctaagtatatttaagatggatgcaaaaggaacgttaggtggcttgtttagccagattcttcaaggagaagacattgttagagaacgagcaattaaattcctgtccacaaaactcaagacgctcccagatgaggtgttgactaaggaagtggaggaactcatactcactgagtccaagaaggtcctagaagacgtgactggtgaagagtttgttttgttcatgaagatactgtctgggttgaaaagcttacagacagtgagtggacgacagcagctggtggagctggtggcggaacaggctgacctggagcaggccttcagcccctcagaccccgactgtgtggacagactactgcagtgcacgcggcaggctgtgcctctcttctccaaaaatgtgcattctacaagatttgtgacgtatttctgtgagcaagtacttgagcccaagactgaagaaaagcctgggcaacataagatccctgtcaaagaaaaccactgaggattctactgtaatggatggggaagggggtcagggtaggatggcaaggggcagaaatagttggtagctagagtagtgatatcaagcattctggctcatgcctataatcccaacattcagaaggctgaatatatatatatatatctgaatgcaacctggtctagagtaattcttaaaccagcctgggctagagagcctgcttcaaacaataaaaaagaattagaggtttctacttcctgtgtgtctcaaaaataaggttatttttgtgggagttggccatcacttcttcctaaagggaataatgaggataacttcagggatcttgaaagcctggtggacccatgctgctattttgtgagtatcagtgtagaggaccaaacttaagaaaaaaactgcgtacttgctgttttaaccaaccacctttacacaggcttgccttcctttgtgagaatgaagcttccttcactcaaaatacactttttccttcttcccacccgcttccacagcaactggtttctaataccacctgagaactcctgttctaccactctctgttctacattgaagagctcattcctatagacttcctagaactttgctgagatggccttatgaagctgtggatctttctgtccagggataaccttgaactgaccctccttcctgcctcctgatgaagttacaggcatgtacacccacactcataaagtaataggaactgaacccaaggttttgtgcatcttagacaagcattctaccaactaaggcataccctcagccctgtagactcactgaaactttgtttcatccatctttctgtattcagtattaactgtactggaacatttatacacaagatgaaacaacagggtctcattaacacatttaaattaaaaaaaatccaagattataaatcatttcttcatggtggcttaagaaaacatactgggaaacattaacaaataagacaaaactgcatattaaaatcaataaaaattaggtagatccatttattcggggtgtattttacaagtgtaagtttggacgagctatttgacaaactttagcattaactgccaactctacagacatctttaacaagaaaaggcatttatgttggccctctgcgtacaggcagtgtcctattgcatatcaaatggtggagatgcattgatagatttgagggcacgatactaaaggagttagatctctacttctactgctatttagttgataaataccatacaaacatacatttatgcgtgtcaccaccaccagtcatttataggatgaaactcaaggtctatctcctttgaaggttggaactagtaagagttcacttagctatacaggagacaccacaagttgtgatcccaatttctaaaagtagcagtgacaagttggagaaagagtcttgggttgctggcagttcatgccaaatgagatcaagacggtgctttagaaaatgtaagtgaagtgcttacagtgggcttcaggggtggacatggtgagggaattgggtcacgataaaagtaatgagtctgaaggttgggtgatctgatgaagctctcacagacagggccttggtaaccatcagaatagctcttcccagaggctacctgcttctgaccatcaaacaataagtttacagagtttgggttgatagttcagttttgataagactgtgatattcagatcaagaatacaagtctgacttagtaatgactaccaatacatacttagaggtatactttggttacatcaagtaaaaagaacaactaattctaactgtggaagtaacaaatagaggccttgtcatgactgccttgagtcatttaaacaatcttcagaccagcagtacaagattctctaacaacccgtagaaatgcaaacatattcccaccaatctatccaaatgctattccaactagacacaaggtgcaactgttagtcagacgtaaccttcaaggtgattcttatatgagctactgaacaaaacacatttaggttttagccagtttgcctttagtattttcatcaacctcaatttactctaacattgaaattagccattcctcagacacagctttaacacagaaattaagctcatttcatcaaaatcttcactatatcatgaccaaagagcctgcaaaagtatctacaactgagctttgaagtagaacaaaaaccaggaaaatgtaaaacctctctctcaagcaccaatggaagccatgtagtgatacgtacaaatccttacaggtctttcctcgtggaaaatcctgagattttaagcactgctactttatagaaggcaggttggtttagtgatgaaattgacttttgaaaagatagtaatatttggggcacttagtatttcacagatcctcaagtcttgaggtaggttaaacatcagagtcctattttacaaagcaaaaaagtgttgctcacttggtagactgttagtctgatgttcaggaagagcatggtcactcttacctcaggttcatctactgaactcaatggggatgggcttgcaaatatccacaggggggaaaaagctatctagcaatcttatgatgaattgcacatattatggaataattcgtttgctcattacaaatatatttacatagaattgagctctaaaattggcaatgtggagtgtaaattatgttgcttttctgcctcacattgagtggaacaggatcaatcactagtgtggaaccacaggaaagcaggtgcacaaatgtagtcatgatacaaatgatgcctgtattccataggggaggaggcctcactctagcccaagatgaagaggaaaaactgtatcagctccggctgctactgttcaatatgccgtagcctgacatcccggggagagctctaataataaatgtgtccgaataaagtctactaatgtttccactaatacataaaccacaagtaaattgatattttattaaaatgacatgtataggagatacctaaatattctaatatgaatgtcttacctaccacataaatcactgtaattattagccctactcacctagttcctcctaattatttaacagaatctagctaattctggataagtcttttcaactcctcacttcattataaagttcccttaggaataagagtgtagttctgtggtacagtgcttgctaagcacatgtgagacagaggtttgattctcagcataacaaaaaaccctcacaaaaattcttttatttaagcaagcttaaaaagtaaagatagacacatacgcttttatataaatgagataaaccaatacgagtcacagaagccaagtaaagagaaggcaggggctgagaagataacagaagacagaggatgcaagtgttatactttagtatccccaaagctgaatgtggaagtaaaaagtttctacactaagaaagtttatataaattatatgaattgtaatttttttgtaaaagtcaaaatgaaatgttctgcatagaacaaaagatatgcctaagcaacatatcatatttgtacaaggccactgaaagtcatgaatattagtaataaatgaaaaagcttaactctgtagcaggctgagtatatttcagtttggtattctaatatgctcaagattgtaaactattcttatacaaaagcagtaatggcaggcagatttgtgtaggaatttttgtgcttctggttggcacattatctactttctaatatggtgaaattaatacagacatttgtaaaaggttgtgcaaaactattgtatttacaaaaatggcacaaaagtgaatgcaatagtcagtgcacatgcacacccattcacatcttcaacaaagaaagctgtctccacacactgcagaacgaggaagagcactagtttcagtgacagctggtaagcattggagtcacacaagtcacaccagaacgggcaaatatcgcccaggtaagatgctcttgttaaagctggaacagcaggtttaaggccgtcaagtccaagcagttactcaaatcttttgcagccatttacttgtgtttggattatgtgacttgtcttccaactcgtggtcttaaacttctgtcttacaagattcaaaaggaagatacagaagaaatcaatacaacagaggtcctgttaaataagagtaacatacaaagctgtaatcatgagaaagtaaagaaagccagagcattaaagctgtaaaacttgcttgctacttgttggagccagccctacaccagctaggtaatgtgtacaattattgtcacgtcatttacttatgttgctgttacatgtcctttgcatcagtgcactgtgaaactaatccaaacctctacacatgtatgctcccttacaacagtagcacacactaccactacctgcaaagctgtcagtctccaacgacagtgagtgaagggaacacaagtgggtaagtaacgtagtcagagaaataaaggacagtagaggactcatgcagttcagctctttaatcagccagccagcttgctagcaaccagggacggtttccgctgagggaggtcctgtggagtgggaatgtggtcaccagtgacctctgtcttatccggggctgcagcaggaagctgcttgttcttcatctttgcttttgccatgttgtagtccccagaatcaaaatacttttgctgaaaacaaaaacaaaaaaaatcaaattagagtctaaaagatctttgttactattacactgattttggttgaaaggtgaaaccacaaccctctaacactatgataaaactgtggggctggagagatagctgtgattaagagcactggctgctcttgcaaaggacctatgttcaattcccagcacccacatggcagctcacaactgtctgtaattcctgttccagaggatcctacaccctcctacaggcatacatacatgcaggcagaacactaatgcacattaaataaataaataaataaataaataaataaataaataaataaataaagccagccagccagcctgtgatgacagtttaagagtaacctcaggatagtctacaagcaaaaccaaatgcatttgcttaagttctgccttatattcatcatgtttagctgatttttattgaatatctactgtatgtaaactaatgtatcaagagctagcaaaagataaaaatgatcaagtaagtcaattgttataacaacttttaaaaccagatgctgtggtcattaaagtctgagtttggcaaaaggcaataatgctgtgatgaaatgatagcacagatgaataatgcacagaaaagatttctcagactttggtaaaatgaagcagctgggactcagcttagtgccgtggatggtctagggagggctcactggctggctccccctaattattctttgataagccagatctggcctacgggtctatgattggaaactttcagatagcactgtataagcttcatatgacgtagtaacaataaaatgtgggccaggtacttctgaggttgctgcagtatcatttctgattgatcttttaaaatgggaattttgatgcccccagaatcaagaagctgcttatatctgagtacatgtggcacacctggaatcccagcactcaggaaatggagatattcaggactgacacaagaccctccccgtcttgtgcactacttcttttttactggttgacatctgcacacaacaaagcaccctgacaaatttcttacttgtgttacttaatgtatgtagaaagtaagaaatttaatagtgcaaatttaaaaaagatnnnnnnnnnnnnnnnnnnnnnnnnnnnnnnnnnnnnnnnnnnnnnnnnnnnnnnnnnnnnnnnnnnnnnnnnnnnnnnnnnnnnnnnnnnnnnnnnnnnnnnnnnnnnnnnnnnnnnnnnnnnnnnnnnnnnnnnnnnnnnnnnnnnnnnnnnnnnnnnnnnnnnnnnnnnnnnnnnnnnnnnnnnnnnnnnnnnnnnnnnnnnnnnnnnnnnnnnnnnnnnnnnnnnnntctctgtacgcagcaggcatacaatgcaagtctaaggccagctgggctgcacagtgagccccaggcagtaggggctatagtgagatatcctttcttagcaaaacaccctaaaacctaagacatactttagagcacgtagaaggccatcttacaaaagcctcttcacatatatttatttattcatttatttgagacaatgtcaagctagcttcaaactctaacttgctatggagcaggggtgggtgactgaattcctgaacctcctgtgttttcatcccgagtgctggcattacataagcgccccacccgacttcccattaactgagcagcattgattttatatatgtggtcacctaacatgacaaactttaaagtcatgtttattagaactgggtcctcagtcttggtacttgacaaaccacaaatacagaaattcacaggctagactgttaaaatcctttttgactctgatgggctataaactcaccatgagtatggtcttattgttaaaagtccagtgagaatattataacattaattttataatatcaatgggtacaatacagaaaatgacctaatgtagtaattgaatatgatccaatcctctcaaacaatgcaaaaactatgtttcttagcttgttaactattatgacaaaggaaaattgaaacctagaacctggtgattcagacttcaaaaaaattctagaacaacaataaaagcttaatcactgatagtttgggaaattacagattcgttcaaatattgacactgcaacttttatataattatttgattcaaatgtcattttcttcatttccaattattttcatgtatgataccaactttaagatatattaattctgctgtgaagaaaccttctcctaaatactaataataatcagtcaagtgagacatgaatctgatgctcaggatcaaacatgattatgtcatagctgaaaatatgcctaaaggtacagttgcataaggagacagtctatgcacattctacactaaacctagactcctgatgaacggagttctcaccttcatgtctcttgcttacatggtatttactaattatgtttttagagaaccacatagtctacttgtgggataacttattaactatttctttgatgctgaacattgatgtggcttctaattatagtaaaagctttaagagaaaaaaagctttaaatttgaagatttttccccctcatactgaattatagttcacattaatttataagaaattagtcaaataatgaaaatacttccatgaatctcatatataatcttccatgaacctttcaaaaataaagagtaattttaatgtttacaaaaaaaaagtaatacattagttacacacaatttcatgcttaccagtaggaattactctaaatattttcccactgtggttgaatttagtatgatgaaatttaaattttactgattactaccttggatgtaaacactttctgtcctaacagttgtagttcttgtaaaatttctttatttagagctatgctaatgtttttaagttttggaataatttccatacaattaatactctgaatctgtttcagagtacagaatttctgcatttttctatatttaatattattttctttattttattatttgaaagatataagcctttcatttttttaatgtttaaactaaaccacattatttgttgatacttttaaaaatcactgttttggagtacatatgtaactatagtgcacacccacagacttgtttcttatataaatagcagatactaatacatttaaggtacttagcatcttatatagtatgtagttatctttcacatatactccatcatttctctgatcctgatatgagaaagaattcaaatatgctttaattctaaatttctaattttttcaagcagaaggagaggaaatttaaaaaacaagtagcactaatattcccatgctaagaaataatgacttctacctcaaaaaggcagacaagactctgggaaaaatgctttcagtaatttgaactactaaaattattaaaggaactatgaagcaaatgaaatgattttacaagagatcatttcatccaaatacaaaggaccgtaagcctctgaatgttgtattagacttgctttcaaacaggcaagctttaataaggatggtggggtaaatatccgtttctggacagtgtttctttttgaaaagaagagggaaaggggccacatagaaaatacagggtgggtttgagttatacctacatttacgtttttacaaagatgacaaagtaagaattctttgacattatcacccatactatggtacatacttgaaatactttacagtttaatttaaaacattgtaatcgcttcttttcatacatattcatttcatacatgaaccatgtgaaatattgacagagatacatgcacctggaaatacaggaataaagacacagacattcaactcagcttgtcagcacactgagctcacagggaaaacatgtgaagatagcactcagcaacttacccctttctgcaatcttttccttaaaaaatcagaccctccaggcttttgtcccaagtgaggataccttgcctttaactttgcttcttcagctttctctggactagttactttatcttccatttcctgaaataatttcaagtaaattaattctgttacaactgaattttgaaaataattcaccttttaatatctagtctctggctttcttgttgaactccaagcaatacagcctttaagaaatcaagcccaggaacctttcaaacgcctctatcttttttctcgaatgtcccatgtgatagctctattatagctgtgatgcatgtataacaccccacacactggataaaaataccgagatagctcagctctcaagtcttgcttgcagttactttccagtcatgtataatacattcaaaattagtcaccttctatggaactcttcagctctttgtctatatttagagaattttcctaatactatcaaaaatctaaaagttcgttgtgatttccttatttaaaatcacgtatgattttaaactccttagactctttactagacattaacaacagcccaaatactagcatattttccctaagtaaatcaatttagaagaccttgatatcgataacggtatttttttttcatcaatcctcacatctggctgtgtgtgagagttcatccctgtaattacagcacccaggaatctgaggcaggaagactatagcaagttcaaggctggcctcaagtgagaaagttcctgtttctaccaacaaaaggggaaattctgttcatgtcaaaaaaacaaaaaacaaaaaaaccccacatacttttaggttttggaggctgttttttggaaaggtcgtcattaaatgtaccccctccaccccagtgcaacttgggggcccatgtacgctagttaatgttctatcactcgtttatgccgctggtcttcttactatcttgaaaatattttctcaaacacctatcttgtttgagtatatattcttcaaaatgctattttacaggaaagaatttatcatatcataacaagaacaatggatcaataaaatcacaggtctcctttgatgggaggatggccagctggccaggatacttttagctattagactcatttctctgaactggcaaaatcacactttggcacattttgagtctctgaggttatttatgaagtaaaatagcagaaatgttaaatctataaatatcaaaccaactgttcttatatagcaagtaaataattcatctagaagatttttgccctgtcttttttgtactttcctcaaaattttatatatatatgtatgtgtgtgtgtatatatattttttattcactttatgtattatcaacacttgaccctcaacaactcccttataccccactttatgtcttaagaggattttgtaggaaaaagtgctaatggcagataccttctgttgtc

SEQ ID NO: 850 - DNA, 1533 bp, Mus musculus
atgtctttcctcctcttcctgcaagcggccagcagtcacctgctgagatgcttcgctactctcttgacccagaaaaccccacaaaatcatgcaaatcaagagggtcaaaccttcgtgtttactttaagaacacccaggaaactgcccaggccatcaagggtatgcaaagccaccaagtatctgaaggatgtcactttaaagaagcaatgtgtgccattctggcggtataatggtagagtccgtaggtgcgcccaggccaaacagtggggctggacacagggtgggtggccaaaaaagagtgttgaatttttgctgcacatgcttaaaaatgccgagagtaacgctgaacttacgggtttagacgtagattctctggtcattgaacacatccaggtgaacaaggcacctaagatgcgccgacgaacccacagagctcatggtgggattaacccatacatgagctcccctgccacagctccgcaccccagggcaaatggcaagaacccggcagctaaaggtgaaagcggactggccataactgcagaatccgaaataatctccccgagaggctgctgcctggcgcataccggcacaggacgttattttaagcacgagtcccgggagagcggcccgagcatctgcccaagagcatcccatccgaaatgggctcgggaggcagagcagggagatattagctaccggtcaggacagttgaggaatactgagtatgatgggttgtgttgctggatacggagtcactcaactacccaggatcctgaaggcggcaccaaggaaaagcgattagcagctcagtttataccaaaattctttaagcattttccagagctggctgattctgctatcaatgcacagttagacctctgtgaggatgaagatgtgtcaatacgacgtcaagcaattaaagagctgcctcagtttgccacaggagaaaaccttcctagagtagcagatatactgacccagcttctgcagacagatgactctgcagaatttaacctggtgaacaatgctctgctaagtatatttaagatggatgcaaaaggaacgttaggtggcttgtttagccagattcttcaaggagaagacattgttagagaacgagcaattaaattcctgtccacaaaactcaagacgctcccagatgaggtgttgactaaggaagtggaggaactcatactcactgagtccaagaaggtcctagaagacgtgactggtgaagagtttgttttgttcatgaagatactgtctgggttgaaaagcttacagacagtgagtggacgacagcagctggtggagctggtggcggaacaggctgacctggagcaggccttcagcccctcagaccccgactgtgtggacagactactgcagtgcacgcggcaggctgtgcctctcttctccaaaaatgtgcattctacaagatttgtgacgtatttctgtgagcaagtacttgagcccaagactgaagaaaagcctgggcaacataagatccctgtcaaagaaaaccactga

SEQ ID NO: 851 - protein, 508 aa, Mus musculus
MSFLLFLQAASSHLLRCFATLLTQKTPQNHANQEGQTFVFTLRTPRKLPRPSRVCKATKYLKDVTLKKQCVPFWRYNGRVRRCAQAKQWGWTQGGWPKKSVEFLLHMLKNAESNAELTGLDVDSLVIEHIQVNKAPKMRRRTAHGGINPYMSSPATAPHPRANGKNPAAKGESGLAITAESEIISPRGCCLAHTGTGRYFKHESRESGPSICPRASHPKWAREAEQGDISYRSGQLRNTEYDGLCCWIRSHSTTQDPEGGTKEKRLAAQFIPKFFKHFPELADSAINAQLDLCEDEDVSIRRQAIKELPQFATGENLPRVADILTQLLQTDDSAEFNLVNNALLSIFKMDAKGTLGGLFSQILQGEDIVRERAIKFLSTKLKTLPDEVLTKEVEELILTESKKVLEDVTGEEFVLFMKILSGLKSLQTVSGRQQLVELVAEQADLEQAFSPSDPDCVDRLLQCTRQAVPLFSKNVHSTRFVTYFCEQVLEPKTEEKPGQHKIPVKENH

SEQ ID NO: 852 - DNA, 20633 bp, Homo sapiens
ggccatagagaaccatcaccagcccagcagagaggccacgcgaacaccatctccactcactggtgacagtctcaataagacattggagatcgctgtgtcctagagcttgtaagccttgccacagatgatgtgagcaaagagcacatgtgagaagcattttgatattttgaagttataaaagatttgcttagtttgtgtaccaggagaaactcaagagcagatggctaggagatgcagcaaggtggaaggcctgatgaaatccataatttgagaggaaaaaccagagtaaaatcaatcaacagaagcaatgttggttaagggtctatagtacatgtctgttttatgtatgtatagtttccctaaagaagggatttttcttttccctttgcaatcatgatatatgatgtattatggtgggaaatgcagaaagctcagctcagcaccaggtatcagattggtcctgctcctcactagctaggtttgggcttctgctgtataaaagacaggcttgcaccagatgatctctaaaacctcttgcagtgctcacggcctgtgattgatttaccatgcaacgttcaattgtgctgcagaggctgttttcccacagaatgcagatggacttctgctactcctcagggcagttccccagccattgacctgataccccaggaccacagctggccttagaaagcacttcccaagcagaggtcatcggtaccccaaccggtacaaagctgttcccaccacagcgtggtgacaaacttgtctgactatgcaccttgaacacagggacctgagtggtctcatgtatcaggtcagcttaaaggtaataaaacagccaccgccagtggggtttcttaggagagttaccaacaagcttaatacaaaagtgtggccacgtggtttgcctggaatgatacacttgcacacaggagacgccctgaatctggtaatggcacatccttgttcccagctctgttatttttccatgtgccctcccccaaggcctcagctcacctcccctcctcatccctgcaccatcctcctaaacttccatggacagctcaagcttgttggccattctttctagctgaatttctttcaaattaaggaaactaaacttcagagttttgtaaagggctatgttgggagatttttattttaagcaatgaagaagaaaaataaaaattcaagtcaaaaaatagtcacttttaggagttgcaacaccttggttccttatgtgccagagagccagaggggaggtcacttaagcggtcactggcagccccaggtgcagaactcaggggtcctgattcccagtaaagggttcattcctgttccacttctctgcttggcagggaatgactaaattctagggctccccaccaagaatgtctgcttcaaagtgaaggtgccaaaaacgaacattaaacagacaccatatcctttcttgttatatgctgaaaagcataactttgagatatttttagtgagtaaatgtggtcaaactcaaggacaaagctgagttcaacttaatgaagtttacattaatatatcccaccttgtttttggcatcaatgttcattttttttttttttttttttagtaatttgcagtttatataattattataaggctggaaatctatctccccagctgggcaaggatacactataaatgtgctagaataaaatatagatggagatttaattatcatgctactcatgctttttaaataacggcatgtcagcacttccataaaccgatttgcattacgttaaaattaatggactggaaacctttgcttctgctgaaatggaccatccccgtctttccctttcgccctccacctccttcctgagaccagctgtgtttcagctcccccttccctgggcccacactgaatctctgttacccttacaaacccctgctgcctctaagagtaaggacccctatcccatcccaaactcaaacctaagcacatgcagcctcatcccatttctccaaaacatgtgaaagcaaaagaaaataaaaaactaactcagcaatcttgttcttcctacagtggtctttggctactgctgggtgtggcccacttttaacctgtgagagtgccatccagtgaagagacaatgggaatgctacctcccagaggtgagcccagcagggaaaatacaggcttctcaaggctaagggcaggtgctctggggtcaggggtcactgacaggtgctacgtagacagaaaggtgatgcaaacggccagtggccacaccttcaagacatgttgataggggcagggggagatggacaggcatgtggagaagtgaacaggctcgtgtcatctttgttttctacattgtgcaaatgtacgcatgtgaatgaagaaggaatgaattaagcaaagaagtaattaatactaaagagaaaaaaataagaaagggaaacaacaattttaggtgcttttctgggctggccacttctgtatccaatttacattttgtatacaacatatctactttaatccctgtaactcggagtagccttgtttttaattagaatactgaaggtcagagaagttaagaaattgcctatgatctcactgctaacaattgaaatgggatttgaagctgggtcagcttgctcctggtcctggttttcctaccactccacgtggcaaaatgttggcagatggcatggacttgtgaacacagataggaaggatggcccagaaaaagagaatttatgtctgaaatacagaatggattactatagagattacaatacaagaggtaacttcaaaggagagtagatttcataacaaaaatgcaagaacctgcatatccaaatgagaccactgcttccctttaccagggttcctctggaggcttggcacttactccaaagatgctgctgtctcaaaacatttatgtaactccttgttggaatgcagttacacagcaagtgacacattccttttaaatagctcatcctttagcaggtaaatttggtttttgctaacagtcgtatcctttgggaccaaatctggagcaacaatttgtattgggaagcataagttttaatcaaaggctacaacagccagtagattaggtgtgactataaaacagagagttgtcccttctttagctcaatcgggctctgaacacaactaagagctaagctctgagctgttttctggagtggtggcattgccagagcacagactcgcaaggtatctctgttgaaaaccaacactcacctggatgtacaggtcatggtgagcaggtgttctgagggaagacaaaggaaaagcagagggagtgttgacaattctgagcttccatatggcagacattcggggcctgttggcatggtcctcagagcagcaacaacagcatcaattgaggttcattaaaatgcagaatcgcaggttcatgtggacctactgaatcagaacctgcattctaacaacagttttcagtggttcttccgcacattaaagtttgaaaagcactggtctggaggaggaggctctacaaaagggttgggtattgaggagccgaaaagacaacctggaactgagattcccagggatgacctgaaaacaagcatttcaaaagctcagaaaagcaagattttaactactctcattttatattatcgcaactacatgttcaagattttacaaaatagtctcagtttcaaacactctgttccctttgcagatcatgtattatggatggtctggggcaacagggatagacccatgggtattgggaatgagtatgcagagggtaagattactgaaattgttattatgtgggtatggagacgggctagttagcatgaaggactgctgagtgtttgggtggtccggctgatcatctgaacactgaaaaattaagttgaagtcagagaaggatcaatgttaagttaggagaacaagagaactttctgtgatgatggaaatgttctatatctacactgtccaacatggtagccactagtcatatgcggctattcagcactaaaaacacagctagcacaagtgagaaactgaattttaaattttgatatgggactactggctagcacattggactgcacaggtatataaaaaccccatggcagcccctgtacctgcaagtctaaagaggaccaggaggatccccgccaaaagaagggtaatcgatgggacaccaaagttatcagtcaagtaaggcagaaatgcttgaatgaataaatgtatatagatagaaagtagagaccttgataaagtcaaactccttgcctttacaagtgtgtgttcagcagccatgcaagggagatgtccatctggcagtggcccagggcaaggtgtcagagccctagtggcagggagatggcatccacatatgagggagggtgacatggtgctaactgggcatctacatagggcagggggacagtggtgacgtgaaattgattacattcagggtgacggagtacacagtaaaaatataaaagataatggaacctagatttctcatggccagagaagagagttacaactgcagaaagagagaaaatgagaatgagccgggcacggtggctcacacctgtaatcccagcactttgggacaccgaggcgggcagatcgcctgaggtcgggagttcgagaccagcctggccagcatggtgaaaccctgtctctactaaaaatacaaaaattagccaggtgtggtggcacgcgcctgtaatctcagctactcaggaagcggaggcaggagaattgcttgaacccaggaggcggaggctgcggtgagccaagatcacaccattgcactccaacctgggcaacagagtgagactccgtctcaaaaaaaaaaaaaaaaaaaaaaagaaaatgaaaatgaaacttatgatgttattcggaatttgagatgtgtgtgaactgacaatttttaatatacagatgaatacagaaatacacacataataaatatgtgcttacatacataagacgcattgcccagctctgtttgactgcaagggtctaggagcagcaacaccacaagagcaacaggtacatttattgcccagattttggcttgtaaatactattctccaaaaaaaatggacgagggctccttggaaaaatggctgattccagggctaggactggtaaaatacaagcttgaaacatcgtgtcatacctgaaagtgaagaagtgctcaaagagtgatggagatgtgtcaaaaaagacactgaagccaggccaaagtggctctcactagccaaatacggggcaattagagcttcaaagcaaataataatggtaacaggtcaaaacccattgagtagaagggaaatccatgtgtccatgctgacacaaataaatggctgaataaaggagcaaatggacaagctgtatcacctaacaggatacaataagaataccccatcacttctgttattttcctgccaaaaattcatcgactgaatctaatcatgaggaaacactgcacaaacccaaactgagggccatgctacctaataatggtctatattcttcaaacatgtcaagatcatgtcacgaaagtcaacaagagaataagaaatacttccaggctgaaggagaccaaagagatgcgacaactaaatacagcgtgtgattctgaatcagatacttccactctaaggacattattgggacactcaggacaactggtgaaacttgaatgtttggggactgggtggtagcaatatatcaatatgaatgtcctgattctgatggttgctttgtggttatgtatgagaatttttttgtttacaggaaacctgggggagtggcaatgtatcacattggcaacttactctcaagtaagtccgaaaacaaaagaactcttcgtacagggctttaactaccatataagtttgagactgtttcaaagtaaaataattaaaaaaaaaaaaaacacccaaagaattatgttcacttattctggcgaaggcactctaacggaatgtctttaggggcatcttagaaagatgttcttctctagcaacaactgcctaaaggaaaagtgcttcctttccacctgacatagacattcacccatcaaagctgaggcctggacctgtcacaattattttgcaaatagggaaaagccactaaaaactcagagaagccaccccagagatctgccattgttgagctgctaaattagcaagccctcagactggctacctccagatttctcgttatgtgtgatttattaccaaatccaattggtttaagttaaaaaaaatcttaatttgctttcagacggcaccagctccgtttgaagaaagggccaatcacagaggtcagcactctcctctcacaggcagcccggggtgcctttggccctaccttgcccctgtatcagactccctcctacataccctctggcccaggatgggagctgctggcacttgaaaagccctttctatctggcaggccacaagtatacaactcctccttattcacaatcaatccttccctttgccccctacccacccccccaaccccccgccacttgcatactgaaacagaacaaaaacataccatacagaaatgagaaatcacatatataattacagccaatatcacagacccaggctacactaagaaaggatcaaggataaagatgaagaactctgagaacagtttccttttggactttgtctcccgattttctctgtgactctttcgccccctctaacccacacactgcttgctacccatctcccacatgaccactcacatactcagaattcttggctcacttttctgtcatcatatctaaagggcatctcccaccttgacagatctcacgatctggacctgagacacagacatggagagtacaccattttcaaaatccttcccacggccccaaagatgctggcaggcaaaggccacatttgttgagtagaccttgtacatccgtggaagtaggcacaagaaatctttgtgaatgctcatgatacaatttggtgcttctacatttctttttctgattatgaaagaatgcccctacccggagcccagagaaattttcacccaatttattatttttcctaaattagcatgtttggcatgaaacaaagatatgcttacggcacagtgctgagtactgtggaggacataaaggataaaggatgtgaggtctgtggaacaggcacccagccagccccctgcatgtatgctccctgaggcgtgaaacatgtttgaagaggtcgtcaatgctccataaggtggaagtggtgagctgaatggtgccctcccttctcccaaatatgcccaagtcctgaccctggaatctgcacatatcaccttatttggaaatagaatcttcacagatgttattaagaatcctggctgggctgggcacagtggctcacgcctgtaatcccagtactttggggggccgaggcgggtggatcacgaggtcaggagatcgagaccatactgactaacacggtgaaaccccgtctctattaaaaatacaaaaacaaaatttagtcgggcgtggtggcgggcacctgtagtcccagctactcgggaggctgaggcaggagaatggcgtgaacctgggaggcggagcttgcagtgagcagagatcgcgccactgcactccagcctgggcgacagagcgagactctgtctcaaaaaaaaaaaaaaaaaagaatcctggctgggtgcagtggctcacgcctgtaacccccacccccaccccacccccatcactttgggagggtgaggtgggctgattgcttgagcccaggagtttaagaccagcccaggcgacacggtgagacccagtctctacacaaaatacaaaaagttagctgggtgtggtggtgcatgcctgtagttccagctactcaggacgctgaggtaggacgatcatctgagcctgggaggctgaggctgcagtgagccattttgcggctgcactccaacctgggtaacagagcaacaccctatctcaaaaaaaaaaaaaaaaaaaatcctgagatgagattatcctagatttaggatggccctaaatccagtgacaggtgtccttataagagaaagcacagggattttcagtcacagaaacacacagagcagaaggtcacttgaagacaaaggcagaggcttgagcaatgtgcctaaaagtcaaggaaggccagtgattgctgggtgccaccaaaagctggaagaggaaagtgaggattcaccctcagagactccagacgaagccaaccctgatgacaccttgactttggacttttcccctctgagatggttagaaaataatttttgttgttttaaaccactaactttacagtcatctgtcatggcataccctggaaactaatacagcgggcaaggcaggctatttattatttatcaatcaatcagtagagacagggtctatctaatctatctaattcatctaacatatccatctatctctctttatatctaatatatccatctatctacctacctacctactagagatagggtctcgctatattatgcaggctggtcttgaacttctggccttaagagagcctccacctctgcctcccaaaatgttgggattacaggcatgagccactggcttagtcaaggcagatcatttaggggtggactttgtttgtccagagaagaaataattttccctcccagctctgataatacatgcccagtaagcacaaaggctctggcatatgggtaaaatggaaccttttagcatatggcaaaggctgtctcttaagacccttctatatgcaagatgggccagtcgggaggaagagaacagaaaaactcgagcacaaacggaactcaaagaccttctgaagctcaacacttgttgactgtctctgaggatctgggtgtgcctggcacacacagcctcaaaagagaatttgccacaagaaagaagacatctagttggtatccaaggacccccatcagctgctgtggggtggggagggccgcttcaggcaccgtccatggctgaggtgggatcccctccaacacggctgcctggagaacaaggacgaacatgtcagagtagccaaagtggctgtagccacggaatgtccccaagggccactgtgcagccactgcagggtctgcgcctgccagggcacaccagggcaggggcagaagttgggggtgggcagggggaaggcaaggaaacccggagtgaaagctattaacctgcatggcgatcagctcaaggtgggggtcagagaagggagggactcccatgctgagactgcacccctgttgtttcttctctcctgttttcaggctgtcctctgacttcaggatctccaagtgcctgcaggcagaggaccaagagtgcaagcccagcacaagcccccatttctttcttctacgcatcatgtgcaccgtgagtactgtgcactccccgtggcagtctctgtaacacaaactctctctgttccaggttcccaaagcgtattttaaaacctcatcagctatgttatttttaaactccaggaaataaatgggatttagtagatgttattaaataacacctactgtcccccaccttttttttttatgaagaagcgtttcagtcaatcaaaggatgtatcagtttctgcatctgcatgtccacccatcaatccacttattctacccctccccatctcctgttacagacagctgtgactatcctcatctactgttaacaagagttaatcctctgtggtaggatatggagtaattttttactgtcttcttggctttcaattggattgtttgaatactttatgttgaacacaagctacttttagaaaaaaaaatcgttagagcattaaggtcattattctagatgaaatataataaaaacctagtaggtggaaataaaccaaatgaaaggaaaggaaggaaggaagaaaagagggttgtgagggaggtaggagaaaaaaggaagaaaagggagagagctcttttcctaagcagcctgaggtaatctgtgaaaatggttcgctattcacttgacccggagaaccccacgaaatcaggcaaatcaagaggttccaatcttcgtgttcactttaagaacactcgtgaaactgctcaggccatcaagggtatgcatatacgaaaagccacgaagtatctgaaagatgtcactttacagaaacagtgtgtaccattccgacattacaacggtggagttggcaggtgtgcgcaggccaagcagtggggctggacacaaggtcggtggcccaaaaagagtgctgaattcttgctgcacatgcttaaaaacgcagagagtaatgctgaacttaagggtttagatgtagattctctggtcattgagcatatccaagtgaacaaagcacctaagatgcaccgccggacctacagagctcatggtcggattaacccatacatgagctctccctgccacattgagatgatccttacggaaaaggaacagattgttcctaaaccagaagaggaggttgcccagaagaaaaagatatcccagaagaaactgaagaaacaaaaacttatggcacgggagtaaattcagcattaaaataaatgtaattaaaaggaaaaaaaaaagggagagagagggaagacagaagagacaatagaaaagaaaaggcaaggcaacaaaagaaaaaagaaatgggagagagaggaaatgcaagacactgggaaacaatggggagaccattacctgcacatctaccccaggaactgtagggaccagtgtagaccctcccaacccgttttcataagtgaactcccagggaaagcttatgaaaataatctctggggctgggcacggtggctcacgcctgtaatcctaggactttgggaggcagaggtgggtggaccacctgagctcaagagttcaagactaccctggtcaacatgacgaaactctgtctctactaaaaatattagccaggtgtggtggtgggcacctgtaatctcagctactcaggaggttgaggcaggagaattgcttgaacccagcaggcagaggttgcagcaagcagagattgcaccattgcactccaggctgggtgacagagtaaaactgtgtcgcaaaaaaaaaaaaaaaaaaaagtctctggatgctcattaaggcccaaacatggacctacaaaagacagcctaggaagtggaaggcagtcacagcaaggaagctccagagggtgcgcaagctcccagcacagcggaaaatgggtcacacggcctggctcttccagctcatccctcatggatttggtttcagggtccagagccttaaagctacagggtggatggcattttggaagcaccgggtctaagctcccattcagagttccaggacttctaccatattctggtctttaaagtgaccttcagcaagtccttcaacctctctgagccttgggttcctcatctatgaaatggggacgagagacccatcctggcaagatgtgaagccaaggcatatgccaaggagcaggtgtacccgcacactgcctcagcaagcacacggtccagtcagggagacacacagtacaaagccaacctgcaaacatctactgattaagtgttaaggtccaaatgcaataatgaagcctagaaattcggatcaacatcaagaataactaagacttggccaggtgcagtggctcatgtctgtactcccaactctttgggagggcaaggtgggcggatcacctgaggtcaggagttcaagaccagcctggacaacatgacgaaagcctgtctctactaaaaatacaaaaattagccgggcatggtggcacgcgactgtaatttcagctacttgggaggctgaggcaggagaattccttgaacccaggaggcagaggttgcagtgagcggagatcgcgccactgcactctagcctgggtgacagagtaagactccatctcaaaaaaaaaaaagttaaaacttactgagcacttatctgctttacacatatttaccatttaatcctcataacatccctatgaggtagttacttttattattccaattttagagattaggaaactgaggcacagggcaattaagaacttatctcaagttatgacagagaagttcctaccatactaggtagtgctgggattttagtgcaggcaacccatctcttaaacactacaccccatacctgatcgataatagataatgtacggctctcatttttaatgaggttatattgttagagagtgacaaggcaagtaaaaaaatataaagtaatgcactgtgatcagcttcatgggacatttgtgcaaagtacagaggtgacggttgggggaggggataattaaatatctgagagggtcggcaaagatttcctgagtcattaaacttgggggtttggaaggatgagtaggagtatttctggattaaaaaaatcaataaaagggaggctcaggcagaagtaacagtttgggtagacagagacaaaaaatacaaaaaactcagcatagaacactgaaaaagtttaatggagataaaacatactaagaatgctaaaatgctatgaagaacccagagggagttcttaagtgatatcttaagggcagaacacaaagctaacaaaaagatctcagggtaggtgaggtcaggacaaaatgtcctgagaagaggcgaggccgcagagatggccagtggctggagcaagacacagtgtgatgtcctgcaaggagcctgcttttaactcgtaaacactggtcactcaggcacctgtttctatagaaacagaggtgacctttaggacagacaggtcttcactgacagccccagaactccaactctggtttccagacaatggccagaccctgacctcagttctggctacattaaactggagatttcagtctttcataggtccactcggttgggtagagttggaaggtcttttctcccttgtcccatttcccccttctcttacctcccaccaagtgtctgttgctgcaagaggccagttaagggtgtcttttccttctaataatctcagtgtttgggcacagattaaccaagcccaaacaacagaactaactcaaaaacaaaagctaagctccagccctgatgcagtgaatacacgtgtttgtaactcctctgtcaactacctcctaacctcctgcctgtctctaaagacaccataaaaggagaaatcagagccgaaagaacctcactgcagagtagatcagtgtattaatttataacagttcacatactctcggcattacctcatggcccaattctaggatccacgcgcgagtatgaactggagcaatgtgaacctccctgatatctataagtgttcagactccggtccaaagagtgtttatcatgctacatgaagcagaccccttgctttcagatcttcctgtcctactgctgagtgttcggaaagaagctcagagtggggcggggggtgggggtacctaagccatcacctggagaatcctcccatttcatgggataccaagactgtaggattggctcaaggtcacacagctaattagggaaactccaggattcaaagctcaaacttctgattcttcagtgtttgaaaccatattttgaacccagttcttagagaaaaataagcagataagattttggggcattgatgggggaacagtttaatgatagaacagggaagaaaaatatgagcacaattcttttctaggtacaacaaggcattttacatacatttttccagttaatcctcataatccttccaggaacttatcagctccaccagtttacacagggaagcggctgaggctggaaggaccagaaagttgcccacagtcattagtaaatgagagccccatttgaccttcgaattgcccatttctgcctacatcacattgcatgcagaaatcactttcctaacctttactcaagcctgctgggaacgtctccggtgggctcagcctctactaggttcacctggggtatgcaaaggccctcctcaagtgttcaggcagagcctcatcttccagcctggctgaggggccctctctcccagggcccaagttcttgagaacctcccagagcccagtaagaatttgcataattaatgacctgcgggccagaatgtccaagcctctctcaccccatccctgactgggaaaccttttagctatttatcaggccagacctgtttatccagtttccatttgggacaacttttcacatgttaactagctgatccttgttaagctagggtttggctcacaaggcaagtatttgcggtttttctcctgggctgaaacactgagtaaggagcatcaagccctccaggggcaggtttcctcccactgcctcaggctctgcccacttttcactcctggctcccacaagggcattgggcctggctctaccctcggtccccctggactggaatgcaaccacatgctgtatgtccaggtggggccactctagaccctaccactggcctggctgctgcagccactaccaccccttacagttcttgggttggaaaatgaccacttcatgttttcagtgttgtacccaactaagacacatccacatgcacagacttcctctgcctagcccaggaccaaggcggtcactacatcattacagtccttctctttcctccttgcctcccacttctctccaaaacaaagcacatgcatgcacgcacacactccctctcccctctctctctgatttagcccaaggattggaaggccctcaagtaaactgtgccttgcaaaaactgccctttgccaccctaaggcatgtactaaaatgtgatcaaagttaccttcagttgacatgaaggaacagcattttccaccggtgaaagtgtgaaagtctagctcgttttaacaggtttgacaggtttgtatgtcattcttagactctctcctacttcttacagaaaaattagattggggttaaatccatttactgcttcagacactgtatccaaattgccaaataagggaaaataagttgtaaattaaaatgatactttaaggaacagaaatgataaatttttagatttgggtttggaaagcacctcttacagaaatataacactttatgtctcttaaaaagtctaattcagtgatttgaacatgtggtacttcaaaacaaactcagatatggttccacgtggaatatagttcatgaccagtgataactccaaacattctggatactgatcttcaactttaagaaaaacaatcacactcaaattacttttttcccttaacagttaaaatgataaagtataaaattccttgctttaaatattgctaattagaaattttaacttttctataacttgaatttgaatctcttctgtttaaatgacaactgaatttcagatttaacaaaatattatgaactcataataaagggtattaatgtatttgttatctaccacttccttccctgtatctttgggccctcaccactcagaccaaggttgtaacatttttattctagaagttgaaaaacactgccctaaatcccttgattaaaaacattctagaagcttgagcattttgtggggagagggagacagtgtgtgaacatgcctcacatgtgctggctgagcaggggatggcctccatcactttatttcctcttcctaatggattgcaatgcgaaaggccatccaccgaggtgatctctccccaatgattgagattctttttttcattgactgtgttctgctgcagtccagcccctcaggtttggccttccacatcattccccgacaacccacccccatgcccttctccaagaaggatgacctcaagtgtgaaataatctccagcatctgtttggggctttgattttgtgggtttattttacacatcctaattctgcaggaaactccctgcagatgtggagaagccctcagttactgaccccttgttaaaagaaacagccagaaaccagaaacatgaccaggaagataaacagctgttgaggtctcagctgctctccagagtggcatcatcttcggaaataagccttgcattcatcttcaccgaggaaattgggccttgaagttcatttagttagagatggtaaaagcatggcacacatacctcccacccttctctcgcacccgtgacagacatcactcatcaatcattatatcctttttctctgggtctgaaatcagccccagaattctcctcaaaaaggggtccagacaaactctgtgaaaccatattaaatatatttgtcattctagaagtctaggttctaagggataaagattctgaaaagaaaaattaaataaaatctgtgcatttttgttgggaggggttggggagaggttagggggtacttggttcaagtcctaaacagagtaggaaattctgtttccttgaaataccatctcaaagcccacaatactgatttaagaaaagagccctcaactaaaagcagaagaagttgctggggctgacaagtatttgcatttcctgaacgtgagctgtgttccaggcactgctctaagcacctcacatgtattgtctcatgtaattaacagaagatgattctgatgctaacatgacccaggattcaagactcatttctcagatccaacatgtttcacagatgagtgcagcacaagtcacacaagacagctgcctgccaagagtgcgctcaccctccccagacctgagctccattaattctgctcaggaaggagggcctttttcaaatccagcacagccctggcccatctgctccagtgtgtcacttagccatagtctgtttctgaatgtgcagcttcaaaaagaagcagattttgtaacggattccccctttgtcccagatagacagcacaacctccatgaaagatgtgcatcttccttcttccagtgaagaagttctgctgacagttctgagcactatgagggccacaggtctatcctgcaacaaacatatcaggctaagggcttactttcaaagaactagagagagggaggctggtttgtttcttctcctaggcttgggtcagacactggcaaactgactcatttgccttgatgggctggcatttggccgcagccttggtcaatgccaatttcagcgttatttggcccttggggattgtccatgggtcctgggtgacagccatgcaccaactgcccccagagctggggaatgagaaaatgacatgaacaatgataaaaataaaaatgagagctactgactgtattggatgtttagtaagcactcagaaaatgtaccaaaggcttcatatacactctcatgctgaatccccaaattcttctgtgacctgttcatctagaaagctgccgatgtccacctcttagagaaatggttctgtggtagtcgagtgtcggtttcaaagctaggattttgaagaagtcctttaactctgtttccccatttgtgagaagagattacccttatgtttcatgttatgcatcatgaagaaaaatgatccacaaaaatatgccttggctattctgcagaaaagaacaaagtaagttctcagtttatgactgttatggttgctgatatactgctctggcttccggtttgctgggtgtatcttatcacactgtcctccatatgtgaatcctaaaccttaaaaacaatgtttctttagatactttcatcaactcaactcgaaactaaaacaacaggctgggaggcagtgagtttcttgagggcagaggttgtgtcttactcatctctgaattccacatatttggcttaaaagaaacaggcaaaaatgttatttgaggataaagaccagagggaggttgagaaagggaagaaagaagccacaaccttctgtagcattatcttgtcaacgaaagttcatatattttcaataagcatctactaagccccgtaagagaaaaaggtttgttgtctgcttggtactaccttaaacattgggtgtttgatgcagacgctgcctttactgagtgggaaatagccttgagtaaagtgtgaagcaagacttcaataagtccttaacgacagtcacaaccatttgtaccctcagtctggccgatttttggaaaaataaaaaatgcccatgctgatgccatgggaatgtcccctaagatcactgcctttctgcactctatcagttgccagccactcaaatctccaaaattatagatgccagaatgacaaggctcttggccaagaaaaaaaacaaaggttcagccaaattagagtatgttgagggtgagaaagctaaagtctaagaggcccacatatcagaaatgggaaactagaatagacatctgtttggaatctccatgggcaattctctatgaccacagtgagcttaacaactgcaaggacagtaacaagggggctttaggttgactctgccactccccacttcccccataaatgcctgctctgaaagccaaaactcagaatgcccctcccaagaccctttcagcctagagactccagagaaaggaagctcacactcttgggctgagctgctaatgcctgcaatgcacctgcttttctagccacaagtggctctttatgcccccacctcgtgggcagcaaaaagggaagatgtccttctcacctaagcatcccagcctccccataggaacagcactattagggaggcctaaaaggggggaatacccaaatggagtctaggtgagctagaccagataccaagcttaaaggcagaggtgtccgatcttccctgggccacactggaataagaattgtctggggccacacataaaatacactaacactaacaatagctgatgaactaaaaaaaaaaaaaaaaaaaaaaaaaaaaaaaaaaatgtaaaaaaatctcaatgttttaagaaagtttacaaatttacattccgtcttgagccacatgtggcccacaagacacgggttggacaagcttgtttaaagggctcagcttgcagttaatgaattcatcactcaaatatttggcgagtactctctgcatatcaggcataattctaggtatggcaaaagagagagagagacgtctgctgtcaggttgaatggtccctatcttaagcctgtgacagcaatcgggccataaaatgttaacatcacaagacttcaaccggggttcaaatccgaggcatgctgcagtctaactttgtgaccttgggtacctgacttccctgttaagggaaggattaaattaaggggcaaatttgaaggccaggagcagagtccttttctccttctaggattcctgattccatgtctagtttactccttctgcattttacagccaagaatatacacacagacacgtacccatgtacacacatacatcatcctttaagtaagacttaccatacattcatctcttatccttatagccgtctggcagtgtaggtatttgtggtacccatgagaatcaatgctcttcgcagacctccaactacaggcaatgaaattgaccaacggctccagctgctgtgctctgaaatccatcactgtagctgtgtgggcaccagactgcacttctcatgggctgattccagaggcaatagcggaacccagcaggggtactgagacaaacctattcctgggagacatgggactcctctgacagctgagtttggctgcaggactccctgatggcattgtggaccctccttggcaatctaggacccttccctacaactgccccttcttctttccttcagtagagatcagacttgcattgctatctgaccattctcctaacctgtttcttttaataaaatccttgaatgtacagtcctgtcttgatgtctgcttcctggaagatgctgacaaacagaattttatcatgtctgtattacagatgaaaaagctgaagttcaagggacaagtaggcagtccaatgtcacggggtggggaggggggggcaaggaatgcattgtaattcaatattagctatttgtgaatcaaaatgccacagaggcctcccattccctccacaaaaagtcctggagatgggccctgaggtgttccctgtgaagcagtatgcctttctccatttccctaggtcctacaactcattagtggtgggccaagagcaaagcctaggttttcagcatctaaatcaggggttcctcctcccggcccaccatgctctgggggccagactgcagagcaatcccagctagagtgaagctctgcagctcaccccgccccatggtgcctgtggagccacagcaggtttttgcatttagtaagtgtgtttggagacaatcatttcataaaagttaatctgttctgggctggagccagctgagactgataactccaagtctccccaaatgagaacttcaaatgcaaagtcacatttcttcccagtgatcttggccgcctgagacctgactaccttcagaggaaaccaggcattcatgtatccacatccaaattttcttggcctatcccagttggagatttcagagctgcttcttcaatgccagaagaagtacgaggaagggcagccgcccctctgtcaccatcacaagccaaacacactccatctgtacctaggtggctggggagacgcccaaacagcacctcaggaaaa

SEQ ID NO: 853 - DNA, 633 bp, Homo sapiens
agctcttttcctaagcagcctgaggtaatctgtgaaaatggttcgctattcacttgacccggagaaccccacgaaatcaggcaaatcaagaggttccaatcttcgtgttcactttaagaacactcgtgaaactgctcaggccatcaagggtatgcatatacgaaaagccacgaagtatctgaaagatgtcactttacagaaacagtgtgtaccattccgacattacaacggtggagttggcaggtgtgcgcaggccaagcagtggggctggacacaaggtcggtggcccaaaaagagtgctgaattcttgctgcacatgcttaaaaacgcagagagtaatgctgaacttaagggtttagatgtagattctctggtcattgagcatatccaagtgaacaaagcacctaagatgcaccgccggacctacagagctcatggtcggattaacccatacatgagctctccctgccacattgagatgatccttacggaaaaggaacagattgttcctaaaccagaagaggaggttgcccagaagaaaaagatatcccagaagaaactgaagaaacaaaaacttatggcacgggagtaaattcagcattaaaataaatgtaattaaaaggaaaaaaaaaa

SEQ ID NO: 854 - protein, 182 aa, Homo sapiens
MVRYSLDPENPTKSGKSRGSNLRVHFKNTRETAQAIKGMHIRKATKYLKDVTLQKQCVPFRHYNGGVGRCAQAKQWGWTQGRWPKKSAEFLLHMLKNAESNAELKGLDVDSLVIEHIQVNKAPKMHRRYAHGRINPYMSSPCHIEMILTEKEQIVPKPEEEVAQKKKISQKKLKKQKLMARE

SEQ ID NO: 855 - DNA, 125322 bp, Mus musculus
  misc_feature (1)...(125322): n = A,T,C or G
tagtttcttgattgaattttaggtcaggagctgagacactgtctttgcctgtctgctgttggttaagacttcatgcagagacacccttcctttgtatggtaatgtgaaacagggtaattacacacagacccaaccgactttggcagcaccagaggacaaagagaacccaagcttgcttcagcctttggttaaaaagcaggtttaggaatcggagccccagaactaactgcatcttctctccttccaaggttccaaacagtggtctgtccttctccacacaccagaactttccctgaacgtagactgataggtttgatgccgatgaagccatttcacgttggctgatctggaactatttggctggttttccatagtgctatgagttttaaaagatgagggcgaaagaaacttttaaaattgttttcattgttaattatcactttattttttaaaagttcaattgcataaataaatcattctgtttttcctaagaagcagttgggatataagcatgcaccattccttatacatattaatgaaccaattagaagagtagtcatcccatttagttattgctgtggctgtctaggaattataattctgtctaccttagtttgattatttatctaatttgtgattttactatgaacaagtttttttggttttttgtttgtttgttgggttgtttgtttgtttgtttttgtttttagatcagctctcactgtgtagccatggttgtccagaaacttactatgtaaccaggctggccttgaacccaaagagatcacattgcctctgccttttgaatcctgaatgagattaaaggtgtgagccaccttttctggctttgcttgcagttttgaatagggtctctgtgtggtcctgtctgcccttagacttactcagttctcctgtatcagccccgtgagcagtaatgtaaagaatgtatcatcatacttggtttctgtaatagctaactagttgactatatttctagacattagaaacagtaggtttcctaggtaatgcctgtgtaccttgtttatggcgggcatttgatcccctggacctggaattacagatgactgtgatcacctagatggatgctgggaacagggtgagggtcctctgcaaaacaagtgcgtccgtccatcaaccatccgtctccccagcccctcccaacttgttttcatgatgttacgtgtgctctgttccttttgtgctacaatacctgcataaatgcaggttgtagttttctttggcaataaactaattggtattttcataaaatataaggaaggactaatagatgatataattgttttttttcttaagttgttgatgttttaaattttttacctcattgttatttgctatattcaatattttattcgatcaatattcatttatgatcattctttttaagtgaagtgtttggtgccactgtagcagctgtctgaaattctagatgttagtgtcacttagcactgctgtgcgcctttgggagacacgaggtctgctgaggaaaagctagcgatgttagttcccgtacagtctccctatcccgtgtttctggctgactcagagcagtggcaccactcagcagttttctctgtggaagagtttctatctaggttttccttcttatctgcaaaataaatatagaaaaattgaaaattaattaatgtttcctgtgctttctagggattgacttaggctgcataaatggcaccatttactacatgaaatgctagcatttgttatgggagcgaaatccagtttacttgaaaaacttgattactaagtttcaggaggcctttaaactcctccggggagggatgcaaaatgcatcatagcattacagttttggtagagttttagaagtggtagtatgcacccgtgacatgaaaacctacctagaccgttggtgggctcaaagaggctagctttccttcttccggctgcataagaccaggtggggcgtgtgtgctttgaccacagtggtcagatttaccaccttcagaaatgaggagggtaattggaaaacacaaacaagacaaacaaacaaacaaacaaacaaacaaaggagttgaaaaggattttccaattgttactgtgctcccttggtccactgagactcctgtccttgtgtgtaggctgtgctaggcacaggtgacccacggtctgactctccaagaacagcattgtcatggcatggttagcaggacacctgtccagtgtgacgaatcaccctagcgtaagcctatgaaagtcacacacgccatgacagtcgggttaagcagctttctgctggactctgagttctaggtgctgaacagtgcccaggcttcttgacaaacaccattcttgggaacagcaccgtcctgtcctttggtgagcctctgttatttttacctgagctggcactccaggaaagagtagatttgctccattaagaacatccatcttgaacttcattcagctcgctgcctcctcctgacctcatttcagagagcactgcccagctctctacacatctaatctgtcttctttgttctttgggctaaatcgtagtctctcgaagcttatctcccactgtgacagttaaaatcttttttaggctgagagcctcttcttatttttctttttttttttgggagtctccttaacagcagcccttccttcccacatccctctcttccacaccttgcttgggctgccacttgggactgttaaaacttcctggtcacctcatttctttgtggagtttaccttccctctacttccccatccctaacatttcctctcttttcaaagatcttggactgggggtcagagtcagtgacagagccatcgcctcacaggcaggaggccatgggctccatccaagtaccttttgtttgccttccactcttgtttagctccccttacccccctctctgtgttagggctgcaggatggacaagctctaccaccaccccatgtcggccaggacagcagcccttgcattgagcctttgctgccagcctagacgtctccctttaaaactcccactgctcgttaatctaaagtcaacaccagggaatggaaagttggagtctggtacttcttacctgaccttcatttttattgtcagtcccatcttttcttacactcaggtttttttttgaagtatctttttgtgcagtccatttaagtgttaagcctgcagaacaatggttgctagacatccgcactctgtatgcctatggtacattgctggcactttgtaaatagcggtgtaatcacagcggtactcatgtctgggcctgagcgagtcacctgtaatggcggagacacttgtgtggctcctgccttctaaaccagtaaatggtaatcagatagaaatgactggaactgcgacatcattttcttttcacctttgaagttttcccttcaatgctttgagttttgagcagccaccaacagagcaatttttccattgtttcagataccatttattatgcataaactaccaatgttctaacttacaattgcttcaaaaaatgttttattgtatatttgaccattttgagtaaattcttcattttttaccctgcagaattcctaaatgtacaaactagtttgctttcgctgtcccagacaggccagagaagtacaaaaaaaaaaaaaaaaaagggagttgagctgtgtagtcataaaatgttgatgttttagatgatagctaacatcttcctttgtagtcctttgaacgctgcctgacccatctgtgttgtccatgttgagtcctcttggctcagactcgggcatcccagcttaggcatgacactgtacaatttccaggaagcagtgcaactggtgtgtaatgacactgtacaatttccaggaagcagtgtgactggtatgtaatgacactgtacaatttctaggaagcagtgtgactggtgtgtaatgacaatttccaggaagcagtgtgactggtgtgtaaaagagactgtctccattcagatgtccagcttcaccttaccccttactactaaaactaaaggatggatttctgttaagaagttggttcaaatacagaggttaagcttgtcccaagtgtggccggtctatatcctgactggccatgtgacacagttattaatcatggccacttactccctgacaggtttagctttaagatgtcagcttgtgaagtttgtggtttctttacatttgttttcccaatggccattctgtttggtagttaggattaggagaaaaagctttgtttcttcttcatcagggctggtttgaaaggttttacaattccctttttaggcagctatttcctaacctggacctttaagagactcaggggagtgtggccagctttcaggtttccccaaaggttttccaggtttccttggatctgtttggagtcttcagaggagggtcagttcactggctaggatgttgctgtagttgccatttctcagtgaatctggggatgccacagcttctaagactctgccctgggtctccaggataaaatgtctttataaaaagttttattttagccgggtgtggtggtgcacgcctttgatcccagcacttgggaggcagaggcaggcggatttctgagttcaaggccagcctgctctacagagtgagttctaggacagcccgtcttgttcccgctccctccacgtgctcatggtcggcctctccgtctctactcttctcccccccacttctctctctgccttgtgtgcttctgctaccctctcaactcccctccccatgccctgaataagctctagtctatactttaaaaaaaaaaaaaaaaaaaaaaagctcttgttttgattttcctgtcttattctccacaattagaaaatggagattgcctgaaagtactgtcctgtgacaaacactttgttcccatggttaaggaagtgtgtgcttctggtgttggctttaatctctgattttaatttgatttctaagtgaatggggacaatatatatattgaagcttctttgaagtttgtctgtaattttttttttcttccattctgtagaccaggctggtcttaaactcgcaatgatcctcctgtctcagtagtttttagtgctctggagctgagctgctgaggaacagagtagcctagcttgccggatgctcagcacacatgtcctcagtagttaccctgaatggatgtctcctgcgattgcttagctgttagatcacctagaccagtgctatccactagaagaggattatatgtcatattgaaatcttctcctccccttctgttttgagagtcccaccaattatccatggaattgtgattctcctgcctcagcttctcaaagtagttggaactgtaggcccatggcaccaagcttggcagtatacacatttttaaaaagttaaaggatatagagttaattttgagtaatatattctatttaacttaatatctaaactcttatttccacatgtaatcaatagaaaggtaggatggtgagcttacagtcctttggtaatactaatgtgataaatggtatatatttgtgtgcactgtctacattcaaatgctatgtaaccatatgtggctggtggctactgtgtacgattagacatatctagaccattcggtaattctagaggtgagctgagaacaatctagaggagataaaatttgttctagaaacaggccaaaaaattgccttcatgtaagagaacactcacctccctaaggtttaaggacacagtggaactagcagaagacatttcagtgagaggggccgcttctttccttgaaggatgcccccttctcccgaggaaagaagacagactgtgctttcctctgttggaggtttttttttttttttttttttttaaagctgtgtatttgtcatagtgtttcactgaaacccccaccaggggtttttgctgggaaactgtggttggtttgatcttagagttgaattttctcctggtgtcttggttctaccaccgtgtctttcctcagaatgtcgggtcagaataagcaggagaatgactccctttgggggaagcagccactaattcttctttcatcttccttctgtgtgtgcatccctgtgctgcagaatggaggcaagggttaaagccactgtggtttcagaagtgagaacccccgagagcgaggagggaagttctggctttggcatgagccgaacttaatttctttcttaccagatgccaatttaaaaagaattcgttgaagggaagtgtcttgcggagggaaatttttaagaacgttcacaatctgcatctatttagcagcctatttgatgtgatgccatgtttaattaatgttggagtgtcagttcacacagtcatattctctgcaagggaagaggattctgtggagaacagaccaggctacaggactcacaggatcctgcgctgtgtccactcccttcttgttaatagtttccatgtgcttgggtgagtgtgtgacttacaggtttccctctcccatctctaacaacttactggggacctggggagatggctcacaagttaagagcactgactgctcttcctgaggacctaggttcagttcccagcacccacagattagcttacaaccatctgtaactctcatcatggaggctccaactccctcttctggcctctgagggcatcaggcatgcacatggtccacagacatacatccagacaaaacatccgtatccctaaaaattaaaacatgctctttggaagtttgtctagttacctgcagatttacttctgctatagcatgattaatttttaaaggagcctatgtgtactttaagctacagcttttatcatatagtctgcagctgtgaaaaaaacccatgctcagtatgctgttctcaaaataatcctgccgcgtgccagcccctgctctgtgacttcatcatttcttctgttgttcctcctcctgctgtttagaaccctcccctttcctgcttacagctagggcttgccattgtctagcggtactgcagtgctctttaggactggggctccttagttggggggaggggcagggacacgcacagcctcagcttgggccttgctgtggtttccgccctgtggttcaggatgactgtcctgaatggaattcattttccctcagctctgttccttccatactcgttacacatcagctggcagcaggccaggagcttctctgtgctcccacaaattgtcagctactttacttctggcccctggcttgccctttgacaaaggaattgatgtttttgattcagaattgtgttgcttagtgaagccagtctaatccatgccatagaatgctcaaagtttaaggccacattctagaaatattgaaagcatcagtacctatattcaatagagcctcctcccacccctgccccacttatctgtaggtgataattttcaagaccctgatgggggttcctggagccataaacagtggcacccccttctccctcacaaataaaatagattagccgtggactgcagtaacagttatgtggatatgctctttatcttgacagccaaccaactgtagatcttagcagctctagctcatgatttctcttccatttctattgttggtttcttgaggcagagtcttgccttatagcccagctggcctcacacttaggatttcttgcatgaacctccctagtgtacaggactataggcatgcaccgtcatgccagctcccttctaataaaggcaagagggtgaaggaaggaagcccctctcaacttccccaggacaccccgggactgcggagttaccagcatggctgctcttgtactttggggtacttggatcagtaaaacacaggtcacctgaacatgatctgagtgatgttgagcagcgagcctgactactgagtaatagggtagcgaatatggcatgggtgtgctgtgtggagagatgattcatgccccagcaggacacaactgcctatagacaacttcctcaagcttggtagactgccatcagtttaaaactggcaccctttatttctgtaattttccatttaatactttgagattgaagttagttgctacctgaagctgtatagagtgtgaaaatggaggttaggatggtgccaatctcgtgtatgtgtatcacaggccagacacacttaagcaggttgtgtgcatgcccatgcccatgttttacagagaaggagatacaggagttaaaataacttgctctatattatacattaagagaccgttctaaactttttagtttaagcaactggcttcttttttgtccttgcttatgatcctgtatccagaactgggccaagctcccctttcagtgttttgtggagtctttgtctcctttaccctaaggagcagcccagaatttgatgctgtggaggaattccatagagaggtactgtttgctatggtacggtttggggagcaggcccaggagaagcaggtgcagtgccaggccagctggtagagtgatgtttgcacaatgaccagcaatgcctgtgggcctcacagatcagagttgcagaaggtgtggtggccccgctcttcagtgtcttaaggcccctcccgctgctctctgtccacttccttctctgctctaagcctcctgttccccgtgtgtctctctgggtggaagtgctcatcctctgctcagccactgcacctctgtcccagaggagattccaagtcctggaagtcatagctgtgccctttagtcctggagctggagacacacgcagggcgcacattcctccagcaggctgagtcctgggcactgcgctcaagcctgcctcttggtacctttcctccttgcagtctccactctgatatctgaaaaaactgcaaataaagtcacctatgtgccaagcatccatacgggtggctaacttacagtcatcatgctctgagctgaatgttttattaatattgatttatgtattgattaagtgattgaaactaagatacagaaacatttttgaagtgaaacaagtattttgagtatttctctgaggatgataagaaagttgaagatttagtaaattaaactggacccagtggctcacatgcacctttaatcccagcactcaggaggcagaggcaggacgatctctgtgagtttgaggccagcctggtctacagagctagttccaggtcagtcagggttatgtagagagatcctgtctcaaaacaccgagtggggtggtgggggtatgacttagtggattgaaacaaagtccatcatctttcattctgttttaaaatgtctgtgctgtgttacatggtgagtcactcccataatctcagtactctggggtctgaaataaaaaggtggcagttgagaccagccttggctacagagtctgaagaaaaccagtgtggcctgcgtggtgtcttgttctgagaccgtgtgttggggttcataggattttaatgttggtttctttctaaaggccagaccacctggatctgccgcatagtcgttgttaatgactaagtattgggtttgctgcttactcttctgtgccttagtttccatattaataaaaaaggttcataatcacacaggcgttatgaggcttaggggagttgtcgacataaggcagtaggagctgagactgtcacagggtgaatgttctgtatagctgctgtcaccaactctgccacccctgttttgccccctcctgctggcaccttagccacttctcagacctgtcacacatgcttcgtctttgcaggaagtcctgccctctgctcatggaagcatggtttgacctagctagcactggccacattttttcggtaacgagatgttccgtcctgggcttttactgtgtaggcagcgtaagaattacagagaacccatctgctcttggagcctatccgttgagacaaacttccttggaatccatatcctgtcttttaaaaagagttacactgttttattacgtgacatcctgaaaacacaatgctagccatttaaagtgggtttaattttcttgagtaaactgcttttaataatgctcccatacgtttccttcctctgttgccaggttgctattaaaatcatagataagagccagctggatgaagaaaacttgaagaagattttccgggaggttcagataatgaagatgctttgccatccacacatcatcagactctaccaggtaggagggccgggagtcctgcacagcctacaggaaaggctgcctctgggaagatgtgggtgcgcggagtgaagggctgccatccgagcactgccccacccttcttccctgctccctgggacctccacccatgtcctttgattctcccaagcaacacacagaccgagtctaaggctaaaagtttccttctgtggatcagagttcctcagcattgtggaaaccgcaaaggaacagagactgtgttatcacctcatgtgattatttagatatcacatgagtttaaactatgaattacgggtgtcgctgggtagtggtgttgcacgcctttaatcccagcactctggaggcagagacagacggatttctgagtttgaggccagcctggtctacagtagagtgagttccaggacagccagggctacacagagaagctggagaaaaaaacagaagaagaaggagttcttgcccgagtcagcccttaccctcttgtcttttctagatgagccagggcttagttctccagttgctatctctatcagaatataggttaaaccccgtatcatgaaagcaatttctgtggtagtttttttaaccttcctacgaagcaagccttgctttgcaccaccagcaaaacgctacggcacaagtagtgcatctcttggatggaatttcagactgaccagaaggatgaacctcgccttagcaggctggtggaagagatattttggggagaggtggggttcctcagattgcagggtgctgagtgtgttcatccagcctgctcccagctctgcagcagtagtcctctccagagttgagggaagtgtgctcactgctgtgagtcagcaggggacgtctcctgacccaggtatgtgtgaggctgaagaagcaggccgccactatggcagacttgccgagcctgctgatccctatggaaaagcaaccatgtatagaggcatgcgtggataagcccacagctgtagctcccctctggagtcagctacttgcaaggtgaaatgagttttgtcagtcagacctgctgaaatgtatcatggtaaacaatgttggcaaaagctaccttctataaaaagcaaatttagaatcctccctgctgatgtctgaaggccctgcacagtgaggcaggtgtcttacctttggctccttgcctgtcttggtggagtgaatgaaattaagtatttcctcctgtgtttattttgctaatttgttcttactctgtatcccaagctggtctctcactcataaccctcctacctcagcctcccagactgctccggactaaaggtgtgcatggccacaccagcagctgaatccacagggactcgctgttatagtgaagcaccctaaagtacatgtgggactcaggctgacctgctggacgccactgcgtcctgcagaattgatgatcaagtttatgatcctagcctcaggtcagacaatctgccttttccagctctgactttgactccgccttctttgactctgtttttattttgccttctgggcctagaattgttatcttgattctgagctaccagaatgcaggactagagcgtgtctccctgtgggatcagggctgtgtcctcaggtctgaatgagcaagtgtgcctaacttaccagagacaattttgagtccgagaagttgagtagtaaaagaacataggcagctaatgagagttaaaaagggagggatacaaagaaaacaaacaatacaatattttttctgaatacctgcagtatatttaatatagaacatttttgtcataagtgaattatggagacaagcctttcacagcaatggtttgatgccactggaagggcacagctgtattacttgaagatgaacttaaaatgtattcataacatggattattctaaagccattaaaaagaaaggcaggcatggtagaacaggtctgtagtcacagtacttgggaggctaagacaggatggcaggtacagcccagggtggactgtgtagtgagtttcagattagcctggtatatagtaagttcctctgtcaaaaaaacgactcttccaaccaagcaataaacactcacacacacacaccctcacatgtgttcctattctacacatatgtggtgttgatgtaaaaagataaaaaagaaagggctggagagatggttcagtttttaatagcactgactgctcttccagaggtcctgagttaaattgccaggaaccacatggtggctcacaaccatctgaaatggtatcccaatgctctcttctggtgtgtctgaagacagcgacagtatactcacatacataagataaataaataaattagagagagaaaaaagggggagagagggagagggagagagagaaagagaacccagcaagcaggataattaatgaaccacgtgtaataaaagtgtgggtctcttctttcagaggtcctgagttcaagtcccagcaaccatacaatggctcacaaccatctgtaatggaatctgatgccctcttctgctgtgtgtgaagacagctacagttactcatatatataaaataaatattcttttaaagaaaaagtgtgggtctgaattgaataagctgtagccagagccaggagtgaccaaagtgactgagaagttaaatttttaaaagaatgttttgttttgttttgttttgttttgttaaatatactatctgcattggtgttttgcctggatgcctgtgcacacgtggatgtgatcctttggaactggagttacatagacagttacaagctgctctgtgggtgctgggaattcaacctaggtcctacggaagaacaaccagtgcttgtaacccctgagccatcttgccaaccccaatgtattttattttagcttaaggtcattttaaggtaaaaattgaaacagtctaaaatgtttttatgatcattgaaaggataatgttctgggaacattgaggtaaatgttgactgttgtttctgacttctgttttaaatcgtggccttatataacatgggggctgcagctcagttgtgtcatcctagcatcctcagggagctgcccagtgctcagcctgtctctgtgagaatgaaggtagatgggggcagaagcctttggccttcagtttctgcaccagtgatcctgacaaagtcatgcatgacatacagggtttggaaaaaagggaaacagcactgactgtggacttttaaaaagttacaaaacagactgcagactggacaaagtacagctggattgcattattgaaaggcctggcattttatgggatccacccttttatgaacaaatggtccatgagaacgaaattcacatttccatttagaaatcaagtcctgtgtggtttctagctgttccttgatgacccagttttctccctaagactctccctctgggtgggatatgtgaggggctctcttgagttgtaagtgatgttgaaattgaactttttctaattcttagcagcgtctttgcttctcagcttatcggattacaggaccatgcctctgaagcagtaaatgttcccatttcccctttctcacagtaatatctgtcccttccccatgccttgtgccctttaagcagggctgttaccgtcagaatcactggttctgctggaccagcctgccgcctgtgtcacatcgctctcttgcttttgcgcaggtcatggagacagagcgcatgatttacctggtgacagaatacgctagcggaggggagatatttggtaagtactttcactgcatcctttaaacaaccctcgagcacactatgccaacccagaatagctgtcctgtgtcttagccgctgtctcagctgtcgcctgatgctgcaatctatgccatcatggtaatttcagcattttttttttttttttttttttttttttggctcggccagttaaatccctccactgtgtttattcttgagcaaaggtgttttgtttgatctagtttgatgttaacagctgagataaaagatctcagaaccaaacattgctgccattcatgtgcctgaggggctttcctgttaccaggctgcagctgaggttgccggggtgatggagatcccacttgtgtgggagcccctggtgtgaggaagggccctacattcttaacccttgtttaaatataaccttgaaacctgtcccttgctgtgcgcacacagtcccggaaggctctgattacttgcctccagtagctgctgtttcttctgggcttgacctttgtacatcatgagatcttgacctttgtacgtcatgagattttgttccaggcatacctgacctggtaaaaactaaagaaagaattctctgtgctgacagcaattaacacggccaaatagaggtgaaaggcagattggcaaacttaaactcctgtattctaaaagaaccagtattaatttacaacactttagaagtataatatcacttttctcattaatgtatgtattcattttatatcctgatcacagccccccagcccccttctaaccctcataagttcctcttcctattatcccttcctcttctcctaaggggaagccccccttgtatacggccctgccctgggacaccaagtagaagcaggaatgtgtgtgtcctctcccattgaggtgcaacctggcagttcagctagaggaaggggagggttccaatggcaggcagctcagtcagagatagccctgacatagttgttaggggagccacatgacgacaaagctgcacgtctgctataaatgtgtagggcacctatgctggcccatgcatgttctttgttagtggttcagtctctgttagcttccatgggctcaggttagttgactctgtaggtcttcttgtggtgtccttgactgctcccgcacactcaatcctatcccgcactcttccacagaactcccaaagctctgcctgatgtttggctgtgggtctctgcgtttgtctcaatgcactgctggatgaaacctctcaggagacagttatgctaggctcctgtctgcaagcacagcagaggatcattaatagcgtcagggttggctctctcccatgggatgggtctcatcttggaccagtcattggttggctgttccctcggtctctgctccatctttatccctgcacatcttgtaggcagacagattttgggtggaaggttttgtgggtggattgatgtccttcttcttccactggatgtcctgtctggctataggaggtggctacttcagtctttatatctccagttgctaggattcttagctggcattactcctatagactctcaggaggcttcccacttttaaagtgaacattattttttaattaatagctatgtgatgtggtggtggtgggtgaatttgtaggctaggccagacatggtgatgcatacctttaattctaacactctgcatgtagaggcagagaaatcttgtgaattctgaatcagcctgatgtcaatagtgagttccagatcagctattgctacctggagagatcctgtctcaaaaaaagaaaaaaaacaacaaaaaaaaaaaccatcaactttttacaggaaaagtatcattgtcactgctatttcccccctttaatagaggaccaagtgtttcttcctcttacctttaaacggcggtgtttatgcttattttacactatacagtgtttaaagaaacacttcatttcaaagaaattagtgcattaaaatctcagaataatattgtatatcaagacaatagtgtaggcttttagtacatatgataattacaagccaatcagtaactttggaggtaatggttccatatcaagacactgattttcctccatgaagaaatctaatagaaggcaatcatggaaatctatgtgtatcttagactaggagaatgcaggctgtgaagtccgtaccggagtatagcagtgctatagagagcacagacatcttcctggtttaatgagtccacagagtggagaatagaagaatgccagagactgggagagagaagttgcctgatgccactggggaatacatggaggcctgacacccaggcacacggttggttcactgatactgcttcacattgggtcacaaatgcacacaaaaccagtgggcaacttttgttacctaacaccttttatgaactttgtcctgaaaggaagcacagcatctgatccacgaactgcctgttagctaagtcatagtaaggcctttgttcacagaggggcactgatatccttagaataacagaggctggctcatcttaatgttcctgacactctaagcaagcacagtgcatgtgtcctgctttgggaacactgcccttttctagttgatttcttttcaagacaggacttctctgtgtagccttggctgtctgtcttggaactcactctgtagactaggctgacctcaaattcatagcagtccacctgcctttgcttcctgagtgctgggattaaaggcatgtgccaccatgcctggcaagaaaacagatcttaaaaggaaagataacagtcctttttggtcataaaccctttgtgtatatgtagcttaatgcatatgtagcatgagtacacagaacacagttttggtattttttaaaaagggaatatcacacaattatctattacaacctagcatataattatatgagtgaatatattgttaattgacatgattaatattgctgtgtgcatgtaggagtttgcatgccaggacacgtgtgtgaagatcagagtacaacttgtaggagttgcttcttgccttccaccttgttttgtggccaagtgtttcttgtttctacgacttcactgtctataccaggctagctgtcccataaccttgtgggtgattctcctgtctcccatctcagtgtagagacacggagactatcacatgggggatctgaactctgaccatcaggccatcagggcaagctcttttacctactgagccatctatctccttggcccatagtagactttttaatgatccagttgaagagaagaaattacatattacccaaagaaattactaaaacctcacacagatttgtggaggagctctgtgacagaatagcttacctaacttgtgccaaggcctgggtttggttactatcaaatcaaaccccaaatcagacggacaacgagactgcacaaggataagctgtctcgtgtggcactgattttctaaagtgtctgtgtacacgataagagaagaggcacttagtcaagaagggaggtgctgaggggtggaggcggagttcagtgataatatgcttgcctagcatgcatgagaccctggattccatttcagcaaaggttaatgtgggcctggggaggtggttgtgaggcctggcgtagtgcagggatggataggttcatccatagaccctctgctggaggcaagtaacccagtcattcttggactcagtcccagggcctctagaataaggtctacagttgtgaagatggactagggctcatgctatggatatttcaagtccagccccctgtaagtccctaggtttgacctccagttttgggtgaagggtgtgagtgtagtgagtcagcatagagagctttggcatatgcttccctttgccttcatgttaaagaacaaacgggagtgttcaaaacagccagggctgcgcagagaaaccctatctcaaaacaaacaaacaaacaaaacaaaaaccagaaaaccaaaccaaaaaaaaaaaaaatcaaccaaccaaacaaagccctaaaacaaacaaaaagaagaaatggtggacaattttcggcaggagtcacgcagacgtcttatcagctgccatgtagaactgatgagaattgatctacagactgatcctgtgagcaagcagcagtgaaagaaagaaaacagttattcaagaacatctatgaaaattcagtaagcaatgagggtctagattcttgagccagccctatgcatggcaccacagcctctctgactctcccatgccctcctcatgtgcacacaggctgggtgaggtagagacagattccaatctggacatacatcgaggtcttcttagtactggcatctggagaggtggctgtcttcccgggaagagtagattaatgagatttgtcatctcattaatatttatcatctttcctgttacctgttggggaggctgtgtcctgaagagtgtagttgaagtggagtctcccttctgtttggagaagcacatcactcttggcttgggtcatacataagactggttttctgccagttgggctgaggtgatgtcaggccatcttcccatttcttttcattgcacttctgctcccagagtttgattgttgctcacaagttgccttcgactctatctagctccagccattagagagaaaaacagaccttaatgcacacaggtagatcccagtgtcttctcaaagggcctgcgttcatgtacaagtggaaaagaaggtcaagtagaggatgtgctgagaggcacctaaggagttagatccacgaagccgtctctgcccccagcctgatggcctacagcagagtccctcagacgacacctctggaaagagctctcctgagtcagaagttattaaaaaaaactaacaaacaaataaagcactgatcagaaagcattccttcaaagggaccaacatttgctatattgtttgtaaaacaactcgcatccacgaacaacacagtgggcaatcagctaagaattaatggagttgaatggctgtgtttggctaagaaaagaggtgtagagacttcagttcaaactagggagatcccagaatttgccaggctgttttgcccagaagagaggacccaaatcctaagaatatggatggagtcaatccaagtgttgaaaaggaacaaagcagacagaagctttgaggtgggaggtatatcagaaacctcaggtaccccagtctgtcatctagaacacccagtgttcagccaaagcaacaggacccccaaacaacaaaagcactcccagttactggaccacaagatgcagaccacaagaaaatgataataggcaggtagatgatgccagatttaccagaagaaaacataaagatgatcacagacacagaggggctcaccagtgaagcaacaacggtaaaggcaggaatcataatgtcacttcagataaagaatatcaacaggagacattgttttaaaaaattattgggctgggaaataagtaaatcattagaaagtctccgcaacagagttgaactgcctgaaagaagaaacacaaactcaaggatagatcagtaagattgccacactcaagtacagagatgagaagaaggaactaaaggcagcttccagagttggtgtcagtcaggagattcctgtgcacagtgagaggagacaatcaggaacatcctctgcacagtgggaggagactgtaaggagcatcctcgtgcacagtgggaggagacagtcaggagcatcctctgcacagtgggaggagacagtcaggagcatcctctgcacagtgagaggagacagtcaggagcatcctgtgcacagtgggaggagacagtcaggagcatcctgtgcacagtgggaggagacagtcaggagcatcctgtgcacagtgggaggagacagacaggagtatcctgtgcacagtgggaggagacagtcaggagcatcctgtgcacagtgggaggagacagacaggagcatcctctgcacagtgggaggagacagtcaggagcatcctgtgcacagtgggaggagacagtcaggagcatcccgtgcacagtgggaggagacagacaggagcatcctgtgcacagtgggaggagacagtcaggagcatcctgtgcacagtgggaggagacagtcaggagcatcctctgcacagtgggaggagacagtcaggagcatcctgtgcacagtgggaggagacagtcaggagcatcctgtgcacagtgggaggagannnnnnnnnnnnnnnnnnnnnnnnnnnnnnnnnnnnnnnnnnnnnnnnnnnnnnnnnnnnnnnnnnnnnnnnnnnnnnnnnnnnnnnnnnnnnnnnnnnnnnnnnnnnnnnnnnnnnnnnnnnnnnnnnnnnnnnnnnnnnnnnnnnnnnnnnnnnnnnnnnnnnnnnnnnnnnnnnnnnnnnnnnnnnnnnnnnnnnnnnnnnnnnnnnnnnnnnnnnnnnnnnnnnnnnnnnnnnnnnnnnnnnnnnnnnnnnnnnnnnnnnnnnnnnnnnnnnnnnnnnnnnnnnnnnnnnnnnnnnnnnnnnnnnnnnnnnnnnnnnnnnnnnnnnnnnnnnnnnnnnnnnnnnnnnnnnnnnnnnnnnnnnnnnnnnnnnnnnnnnnnnnnnnnnnnnnnnnnnnnnnnnnnnnnnnnnnnnnnnnnnnnnnnnnnnnnnnnnnnnnnnnnnnnnnnnnnnnnnnnnnnnnnnnnnnnnnnnnnnnnnnnnnnnnnnnnnnnnnnnnnnnnnnnnnnnnnnnnnnnnnnnnnnnnnnnnnnnnnnnnnnnnnnnnnnnnnnnnnnnnnnnnnnnnnnnnnnnnnnnnnnnnnnnnnnnnnnnnnnnnnnnnnnnnnnnnnnnnnnnnnnnnnnnnnnnnnnnnnnnnnnnnnnnnnnnnnnnnnnnnnnnnnnnnnnnnnnnnnnnnnnnnnnnnnnnnnnnnnnnnnnnnnnnnnnnnnnnnnnnnnnnnnnnnnnnnnnnnnnnnnnnnnnnnnnnnnnnnnnnnnnnnnnnnnnnnnnnnnnnnnnnnnnnnnnnnnnnnnnnnnnnnnnnnnnnnnnnnnnnnnnnnnnnnnnnnnnnnnnnnnnnnnnnnnnnnnnnnnnnnnnnnnnnnnnnnnnnnnnnnnnnnnnnnnnnnnnnnnnnnnnnnnnnnnnnnnnnnnnnnnnnnnnnnnnnnnnnnnnnnnnnnnnnnnnnnnnnnnnnnnnnnnnnnnnnnnnnnnnnnnnnnnnnnnnnnnnnnnnnnnnnnnnnnnnnnnnnnnnnnnnnnnnnnnnnnnnnnnnnnnnnnnnnnnnnnnnnnnnnnnnnnnnnnnnnnnnnnnnnnnnnnnnnnnnnnnnnnnnnnnnnnnnnnnnnnnnnnnnnnnnnnnnnnnnnnnnnnnnnnnnnnnnnnnnnnnnnnnnnnnnnnnnnnnnnnnnnnnnnnnnnnnnnnnnnnnnnnnnnnnnnnnnnnnnnnnnnnnnnnnnnnnnnnnnnnnnnnnnnnnnnnnnnnnnnnnnnnnnnnnnnnnnnnnnnnnnnnnnnnnnnnnnnnnnnnnnnnnnnnnnnnnnnnnnnnnnnnnnnnnnnnnnnnnnnnnnnnnnnnnnnnnnnnnnnnnnnnnnnnnnnnnnnnnnnnnnnnnnnnnnnnnnnnnnnnnnnnnnnnnnnnnnnnnnnnnnnnnnnnnnnnnnnnnnnnnnnnnnnnnnnnnnnnnnnnnnnnnnnnnnnnnnnnnnnnnnnnnnnnnnnnnnnnnnnnnnnnnnnnnnnnnnnnnnnnnnnnnnnnnnnnnnnnnnnnnnnnnnnnnnnnnnnnnnnnnnnnnnnnnnnnnnnnnnnnnnnnnnnnnnnnnnnnnnnnnnnnnnnnnnnnnnnnnnnnnnnnnnnnnnnnnnnnnnnnnnnnnnnnnnnnnnnnnnnnnnnnnnnnnnnnnnnnnnnnnnnnnnnnnnnnnnnnnnnnnnnnnnnnnnnnnnnnnnnnnnnnnnnnnnnnnnnnnnnnnnnnnnnnnnnnnnnnnnnnnnnnnnnnnnnnnnnnnnnnnnnnnnnnnnnnnnnnnnnnnnnnnnnnnnnnnnnnnnnnnnnnnnnnnnnnnnnnnnnnnnnnnnnnnnnnnnnnnnnnnnnnnnnnnnnnnnnnnnnnnnnnnnnnnnnnnnnnnnnnnnnnnnnnnnnnnnnnnnnnnnnnnnnnnnnnnnnnnnnnnnnnnnnnnnnnnnnnnnnnnnnnnnnnnnnnnnnnnnnnnnnnnnnnnnnnnnnnnnnnnnnnnnnnnnnnnnnnnnnnnnnnnnnnnnnnnnnnnnnnnnnnnnnnnnnnnnnnnnnnnnnnnnnnnnnnnnnnnnnnnnnnnnnnnnnnnnnnnnnnnnnnnnnnnnnnnnnnnnnnnnnnnnnnnnnnnnnnnnnnnnnnnnnnnnnnnnnnnnnnnnnnnnnnnnnnnnnnnnnnnnnnnnnnnnnnnnnnnnnnnnnnnnnnnnnnnnnnnnnnnnnnnnnnnnnnnnnnnnnnnnnnnnnnnnnnnnnnnnnnnnnnnnnnnnnnnnnnnnnnnnnnnnnnnnnnnnnnnnnnnnnnnnnnnnnnnnnnnnnnnnnnnnnnnnnnnnnnnnnnnnnnnnnnnnnnnnnnnnnnnnnnnnnnnnnnnnnnnnnnnnnnnnnnnnnnnnnnnnnnnnnnnnnnnnnnnnnnnnnnnnnnnnnnnnnnnnnnnnnnnnnnnnnnnnnnnnnnnnnnnnnnnnnnnnnnnnnnnnnnnnnnnnnnnnnnnnnnnnnnnnnnnnnnnnnnnnnnnnnnnnnnnnnnnnnnnnnnnnnnnnnnnnnnnnnnnnnnnnnnnnnnnnnnnnnnnnnnnnnnnnnnnnnnnnnnnnnnnnnnnnnnnnnnnnnnnnnnnnnnnnnnnnnnnnnnnnnnnnnnnnnnnnnnnnnnnnnnnnnnnnnnnnnnnnnnnnnnnnnnnnnnnnnnnnnnnnnnnnnnnnnnnnnnnnnnnnnnnnnnnnnnnnnnnnnnnnnnnnnnnnnnnnnnnnnnnnnnnnnnnnnnnnnnnnnnnnnnnnnnnnnnnnnnnnnnnnnnnnnnnnnnnnnnnnnnnnnnnnnnnnnnnnnnnnnnnnnnnnnnnnnnnnnnnnnnnnnnnnnnnnnnnnnnnnnnnnnnnnnnnnnnnnnnnnnnnnnnnnnnnnnnnnnnnnnnnnnnnnnnnnnnnnnnnnnnnnnnnnnnnnnnnnnnnnnnnnnnnnnnnnnnnnnnnnnnnnnnnnnnnnnnnnnnnnnnnnnnnnnnnnnnnnnnnnnnnnnnnnnnnnnnnnnnnnnnnnnnnnnnnnnnnnnnnnnnnnnnnnnnnnnnnnnnnnnnnnnnnnnnnnnnnnnnnnnnnnnnnnnnnnnnnnnnnnnnnnnnnnnnnnnnnnnnnnnnnnnnnnnnnnnnnnnnnnnnnnnnnnnnnnnnnnnnnnnnnnnnnnnnnnnnnnnnnnnnnnnnnnnnnnnnnnnnnnnnnnnnnnnnnnnnnnnnnnnnnnnnnnnnnnnnnnnnnnnnnnnnnnnnnnnnnnnnnnnnnnnnnnnnnnnnnnnnnnnnnnnnnnnnnnnnnnnnnnnnnnnnnnnnnnnnnnnnnnnnnnnnnnnnnnnnnnnnnnnnnnnnnnnnnnnnnnnnnnnnnnnnnnnnnnnnnnnnnnnnnnnnnnnnnnnnnnnnnnnnnnnnnnnnnnnnnnnnnnnnnnnnnnnnnnnnnnnnnnnnnnnnnnnnnnnnnnnnnnnnnnnnnnnnnnnnnnnnnnnnnnnnnnnnnnnnnnnnnnnnnnnnnnnnnnnnnnnnnnnnnnnnnnnnnnnnnnnnnnnnnnnnnnnnnnnnnnnnnnnnnnnnnnnnnnnnnnnnnnnnnnnnnnnnnnnnnnnnnnnnnnnnnnnnnnnnnnnnnnnnnnnnnnnnnnnnnnnnnnnnnnnnnnnnnnnnnnnnnnnnnnnnnnnnnnnnnnnnnnnnnnnnnnnnnnnnnnnnnnnnnnnnnnnnnnnnnnnnnnnnnnnnnnnnnnnnnnnnnnnnnnnnnnnnnnnnnnnnnnnnnnnnnnnnnnnnnnnnnnnnnnnnnnnnnnnnnnnnnnnnnnnnnnnnnntgcacagtgggaggagacagtcaggagcatcctgtgcacagtgagaggagacagtcaggagcatcctgtgcacagtgggaggagacagtcaggagcatcctgtgcacagtgggaggagacagtcaggagcatcctgtgcacagtgggaggagacagtcaggagcatcctgtgcacagtgggaggagacagtcaggagcatcctgtgcacagtgggaggagacagtcaggagcatcctgtgcactgtgggaggagacagtcaggagcatcctctgcacagtgggaggagacagtcaggagcatcctgtgcacagtgggaggagacagtcaggagcatcctgtgcacagtgggaggagacaggcagagtatcctctgcactgtaggagacagagcatattccgtgcacagtgacagtattaggagggtgtagagacagaggcagaaactgtaagaaaaaatggctatgaaaatagcagacattttgaaaaaatagtaactcacatgtccaaaaacctcaaggactttcaaatgtagcctaaatacaaaggcccacaaataggtacatcacaaggagaaccgatggggtcaaaggaggaattttgtgattttaaaagaagacatgtatgtttttttcttgtgatgtctgtgcttcagcggcagtagttatacaagtatgaccagtttaaatgatcacgcattagaataggaaaggctggaggtctacgtgaaattgaaaaccaagtgtgttgggaaccagaaggccagataaagtccaggaatatggctcccagcatgtgagctgctgttcacacgctgctgttgctctttggaaatggagcaaggtcagctgtggaactgaactgtgaatttaggttagtttacagtggcatttgaatggcagccagagcattgtacaagagattttttattttgctggggcaggggtgagctgccatagagaaagcactttctccaagatcactcgcactctggcaccaagtgtaagttgagaaatcccccagagccattcgggtgtgataaactgctggaagactctcagaactcactgctgtgccctcttccagggagaggatgtcggtgaaaccagccaagggcggtgtaaagccggcaggcccacaagtgctgggtgcagagtcttcattgtcctttgcctgggtgtgctttgtcttgggatgagtgtgtgacaatatgcacagaatattgttacagggaggctcagcctttgcatccacatttttattttatgtgtgccttattggttggttggttggttggttgattgattgattgattgtccatactgttgacctcaattttcaggacaattgacatgatgtcccagagtcccaagcttaatttcatatggttggtcttcctagtgttcctacattattattagaccttctaacacgactgaggctccaggctaataaagaccccaccacaaagccaaggggaggttagatcttttctccgggcaaggccacattctgattccatactgtacagtgctttcatatttaattgcaccctattttgaaagaactaaaagtattttactttggccatagtcagtcagttcagtgtttaattggtagtgtgccatgtgtagactctggacttctaagacgtagtgtgcttgaaaagcagagaagagcaagtctcactgctgatttctctatcgttcccggtgtgaaatgtgctggataagttgctgagatcaagcgcagagtgagtggtactgcttgctttcctctgtagttgctggcagttatgcagatgtgcttctatgtcgctgatctagaagcggtgatgagcccgtgcttcacatggggaatgcctgaccaggagcctgcactgggaaatgctttcaaatcagaagcttttgaatgccaatatgatttggggttttgttttgttttgttttttgaaacattttttattctggggggttttagatgagaactatctggtaaaatttatatgagtgttcaaaataaaactaaaccctgaaattggaaatactgatcccaagcatttccgatgaaggacagtctgtctgcactggagttcggtggcagaggcagcctagcaagagaagctgctagcttctagcagcacagctctacagcatggccataggaggggtgctgagctcagaggaaagctccgcagatgctgggatggaaggaagctgcctggtaggtctcagtagctgtgtttatgctgaccttgcctaggggaccggagactgaaccactctggacatcgtgctagtgctgccatctcacccagctcttgtgcctcgctcaccaagtgtcttacgagggcttaaaacacacaaccctgtctccaactgtagctcccaatgctctcctgctccttccacatttggctgtcctctgtcctccactgtaaggtctagatattgtcccatttctttctgcaactctcgtcccacatctttgttccacttacttgagaatctttcctgcatttcctcatttgagacaactttaactaaactttatttttcctactggcttactattctgtatctcatttttttctttacttttcttattagtctttataaccaattgacatatactcagtcactcattagtgtgtagcatttttatgctctgtgtgcatgccatgcatccacattgaagtcattggacaactttatggaatttctcctcccctgtcttcatatgggttccagggactgaacgcaggtcatcatgtttcctaacctgctgagccatctaactggccctcacttgtttacatctgaccttaccaaagtacatcttgacagtaaagagtttgtcttgtatttttggttctagagagtcaacattgcccttacacatgataggcaagagatactgaaccatatcccaagccaggattttgtaatttttggtgcttgccaattctcagaatagttcccacagaaactgcataggcactaactatttatagatcagctgaatgaaagaaggagggaatgaaaatggactgatggacagatggcattacagctgtgacctgctcttattgtttaatgtggtgtccagcacagcacgcacatattccaagtcaagcagagaatgaatggccatttctcctgctcacttattttagttgtgtgaggttttgacttaggggagaaacatgtttatctttgctatttgagtgtatagagaaaaggaagcagatgggaagtttgacctggaagaagtggagtgcatcactgcatgcgtgttgtttgctctattagctgactcggtgaaatgaatattgcggcttagcactgcgttgtaaaagggcagccatgacagtgtggctctgcctaatgttccaatagaattgagaagctagtaagtttggcaaatcactaaattcataattcaaaactcccccaatataatttcttgagatatattccctcaaacttcctatcatgtgctcttaaacccagcacttgatcaaaagcttcctggatgccagcaaaacccataggcattgaagacaaagtgctaatttaagaggaagctgctgaagtgtgaatgacttactaggaatgctctcacttacttaagataacatttcccagttgttagttcagttttaaaagggataatttttatctgtcccagccaacttctaaataaatgagacagagactataagatttatttaaccaccgccgggtggtgtctcgaaaaaccaaaaaccaaaaacaaaaaaaaaaaagagagagagagagatttacttaacccagctttactttatggtacagtatctgagcatttattagtctgttttaatcctgcgagctaacctggctacctctcaggtgtattctcatggtgtctctgtgaccctttccttatagacacccgacccctgctgggattggaagtccagccttattctctcccccaatcagtcattggatgatcagcttttattgacaaatcagaaaatgaatggggagcaatgtttacatagcattgaaataagagattattagaataagcattgcagtgccatgtctggattgcaaccagatatgggggcagaaaatcagcattggaataacaaaggataatctttacacagtgcacaataacattatgcccacatccaatggtgccaacaggcatgaaacccaggaattcccacaaaccaatttatttatgccatggagcattcaaggactgccagtagggcaggcagtggtgagggcaaaattgtgtaaccattgaatgctacaccgtgaggtccatgttccattgagaacttttatcttgttaaattctagatcttcagggacattaacatagcacatactgtgtgccagcttgctgtcacctttaaaacatatgttattttaaccacatacattctttgtatccttctaaacaaaactagtattctcccatcaaactggttcattattattattattattattattattattattaattattgttattattagactatgaagactagtactctgctcagactttacattggaggcagataaccacaccactgtgcttatctgatcactgatcaaacaaataggagccatttcctccccagttaattcctcatttgttagtctgtagttttgctttcttaatatcatacatagctagtttatgtttgtaatctgtacaggatgcctgcagaagccactgtgcatttccctcagagcgccattggctctcttctcttctcttctcttctcttctcttctcttctcttctcttctcttctctctccttttatcttcttttcttttctttttaattagatattttctttatttacatttaaaatgttatcccctttcctggtttcccctctgaaacccccaccccctcccctgctccccagctcaccaacccactcactcccacttcctggccctggcattcccctattcaggggcatagaaccttcacaggaccaagggcctttcctcccattgatgcccaataaggccattgtctgctacatatgcagctggagccatgagtcccaccatgtgttctctttggttggtggtttagtcccagggagctctggggatactggttagtccatattgttgttcctcctatggggctgcaaaccccttcagctccttgggtcctttctctagctcctccatgggggatcctgtcatggacagttttctgatcaagatgttatttgtaccatgtgagctcagtgcacgccgaggccagagaatgatgttggctgcttttctttctctctaccatagttttgaaatacagtctctcattggacctgtaactcacgatttcagtaggactctggtagtgagcttcaggaatcctccagtctccaccttccaaggggtcagattactggcatgtaccaaaagcaacattttacatgggtgctaaggatatgagcttggatcctcatgcttgcacagtctcatcagtcactatttgtgggtttttaaaatatttatttttttcatggaaggtttttgagataaggtctcattgtgtagcctattctacattgagttcaccatccccttgtcttctgagtgctggcatcatacccaagccaaacattttttgctgaatttagtatatgtatgttcgaaaggaatttttttctgttttgtgtgtgtacataaatatacatgtgtatgtgtcaatataaatctgtatacatacacacttttcctgagagttttttcaaactatgttttaacccttttaggaaaatgtagttttccttggtctagtaataaagacatgaaaagatatttaattataacctttattgatatctacagtttttaatttcttatttgaaattaatatgtcacatttcagtatatcttcaaaatgtcttgaagatattccagccagcattccatttttttaaagttgtaaaatattcagtacacagaattattttaaccattttcagtaacattaataatgacactgcagtcctgtcatctgaaactttgcattctgtagaatggaaactcgaggtgttaatcactggccactattctgccaccctacagttcccccaaagcatcacccttcctgatgttttgagcttaactactttagggacattatataaatggaatcaccccgtatttgtccttgtgggaccagcttatgtcacttatgatgttcatgtgtcagactcatcagtgacacatttcatgtgttcatctggtgatggacccttgagttcccatgcttcggtcctgatgctgatactagtgagcactgatgtaccagtgaaaacccctttttactgtaagcatgttcaactagacgtacaggagaagggtctcgtggtaaaccccgctcccccaacacccagggctgacaatcgccagcattatgctggtgctgttgtttcttttccccaactgttctatagtttcagttttgaatatttcaagttaaattcaaggaacatttttttttagtcataaatacttacagtttttcttatgtgtaaaggattttaaacagcttaatcacaacacctttcttaagggcactaatgtctacagagtgagttctaggatatccagggctatacagagaaatcctgtctggaaaaacaaaacaaaacaaaaaaaagagcactaatactgtttgctttttgcttttgtttttgagacagtctcactagttgttagccccaactaacctggaacacttaatcttcttcctcaggctcccaaatgctgtactccccacccagcttctagtagcttcttggtttaagatattttgcagctttagacgaggtttagtgagtgtcttaccttaaaggctctttttatcccttcgctctccttttcgtgagtgttctttagcaaagcaatcatagctaagtctttgttcatccacgtctctcagtctttttgcccctgttttcacagactatttgaaacacttgtttcatttgttgtgtgtgtgtgtgccagagcacacacggagatcagaggacagcttgtaggtaccagttcccccctccaccatgtgaataccagccttgacagcaagcacctctgcctgccaaccatcctaccagttctgctttttccgttctgtcatttttactgtgtgttgggcaggaggggcgatcactgcagtgattgtggttgttgccttcagtagcacttggttctgtcaggtgattaaactgaacctgtcgcagctccagtttgtggtttccattttatccttactcttatgtagcccttactccagagggatagttttctggaatattcaacaaagctgctctttttaacttgaaggagaactccaggatcttctgggtggaacctctgagtgactcctggctgctgctctctgctaagcccacctccgagtgttaacgttgtgtgcatacagccaggggcttgaccatggctctgagtagaattgccattctgatttttaaattttaaatgtatagctcaggatagcctcaaacttgcaatcctcttgcctctctaccccacacgattgcaattacatgtatgcatccgaataccttcttgctaattttgatgctctttccagttttcttcccctttgtccttctgtgttactacttttcttgtttctgtaacaaaatcctggacaagaagcaacttgatggtttattccaatttacatttgatcatggcagggagcatagtaagcacaggcactgtcacagtgtcccagagttggtaggcaggcactggggaatgctggtgtgggtccctctgtccttaggctggacttcccattttatgtaacttaatctagaaagttccttacagatatgcccagaaatttgtctccaaggtgatcccagagcctttcaacatagcactttcaagccatcaccttttattccttagcttggttcgtggctctctacaatgtgaatattcagtccaacttctgaagtctcctgggctttttaacgatattggaaagcccaaagtcctagagtcacagaagactcaaggtggcctcctaactgtaaatccctataaaatcataaacaaatcacccacgtcaaatacacagcagctctgagtaaacattgatattttgaaagaagaaaatggagcatagaacagagcaattgggtcaaagcaagaccaaaacctagcagtaaaaacaccaagtcttcaagctctgtggcctgcatctggggattgtgatggggccacccgagtaccacaagttatggctaacccccagcccttcaacagttctgtctatcacacggcttctctcccggccggctctgccaggtgcctgcagctttcctcagtgcctgtcccatggccctggcattcccagtgtctcttcattgctattctggcttcacgttcagagcttcacccagtgccccttcaggactttcttacaggaacctctcccttgccacacatggcctggcctcagcaacactcttcaactgtgacttaaatctttggacccccacagtcccgtgtctctcatgcctgagaactcagtattgtgtgactaattccatcaatgtctgctaccagctcaaagtggatggagcatggcctctggggaccacagttgtatcagtctctgtgtactaatggcgaaacacatccctagggatctgttttccaggaggaggaggggttccttcagtgacttactctgttgagggtttcttctttcaaatgaattttcaagtttatacagtggagtctccagtgtctaaggtcttgcccttagggcatacctagctcctgtagttgcagtggagattgctgtaatctctttaaaaatcctgtagccctgtcttttagtaaggttaaactccaactcctttcctctcaaagtgcacaatttcatatctttctgctttgccttttgatactccctcacagatgacctggatgagaactgtaagaagcagccatgtcacagcctgcatgctattctgtatttacgtttcttctaccagatgaattagtccattgctcttacgtccagcctctctcagttctcaacacatggagaaaatagccagattccttgctaggatatcataaaatggcctttagcccagtttctaatctagttctcattctcctctgaaactcgggagccaggccttcactatcttctgtttgtcgtggtaatttggtcatcccaactcccaccagaacggcccatgaagcctgtttacagcatgcttgggcttgatacatgcctgtcttactatgtctttataatctggaagcccttctttccccacttgccacatcatttttgtttgttccttttcctttgtagtctcttgcttaagaagctgggctgttgggctagagagatggctcagtggttaagagcaccaactactctttcagaggttctaagttcaattctcagcaaccacatggtgatggctcacaaccatgtgcaatgggatctgatgccctcttctggtgtgtctgaagacagctagagtgtacttatataaataaaataaataaataaatgttaaagaaaaaagctggactgtcttgtaagatgtgtaagtactaaatttggctgttcatgtctctcatcatgaaacatgtcctcttagctctcgcactttctcgtaaagtgccagttgtggttacagtttgcttaaatgtaggtggaattccctggtggagaggcaggattctgcacacctcttccattggttcacttcaagttttggatagtgactggtttccactttagtgatgttcagataacctgcaggtttagctgtgtccctgtaatccctttctgaccttagccagtttttgaagctgctcctctcacatggtcacctagagacatggttccatgctaaaatacaaagtgacgcctggtccaaatagcacgtccttctagtcctgacactgccgaggctgggatgggatcatcagagtctgtgtctagacaaggttccatggcaagcttgattcaggtcagcttgggttacacaggaagaccatgtctcagagcaaagttcaccccaaatgttgcaaactggtagttttctaattctttcatgctttctacatttatcagttttaaagaactttgctttaaaaaaactagagattgtagcaaggtcagatttcaagcaagttggtaccctaacagtgtccagtgggacccacttgagttgtttgtttcttttctgtgagtccatggactggaatgtggctggtgtgctttagtccactgaggttttcttcttcttctccatcaccatcttctccctttctctctcctctctatcactgagctgcctccctgtcctgtgtcattattctctcactactcaaattattccacttcggaaccacatccagttgacttctcaataactcctttgcctttgaacaagattctagaccttccttgaacattctctgtcttagatttagagttaaacagtccctatctaaaggagagaacactaggagagggataagtcctacctcggtaagcagtcatatttatttaatgttaaattaacattattcatttaacattgcttttctgttcctcctacacaaacggaagcacaccgcatgatatttttttctacgtgtaggaactcaagaatagaagcatcattcagactagccaacctgtgctgatacactgggacagtatgagaggcatctgtttctactgcaggaaaccacaattaacattttattaaaagacttttgggataggaggaggtgccttatcacaagcaaacaggcctttggatttagagatacggagccctgtgaaaatcagtcatgcttcatgtaatcatgtaaatgggctaggtatcaaaagtatttaaaaagaacagaaaatgcccttagtttacaaaacctgcttagtggcaaagtgagtttaaaaaaatatatggtcagaactctgttggtgggtgggtcctgcatccacatttgtactggttgcatttcccatgccactgttctctgaacaacatacacatgtcaagtacttcacatgtgccagctagtgcacaagtacaagaagcagtgatgaatacagaagacacaaatccctgttgacacttgttagtaggagagacaaacaacacacaaactacatagatgtgtaattagtcagaagatgataaagtgtgaaaagtctggggccagaggagcagtggagagttggctcagttgttaacagcccctgccgctcttgaagggggaccagagttcaattcttagcatccacgtggtttctcactaccttctgtgactctagttctagaggctctgactccctcttctggcttctgtggtcaccaggcacacacgtgatacacagagaagcatgccagtataacacccacactaagataaaatcaaagggcagtcaagggaggactcggagaaggctgtaatgcgatcaaagttcacatgttgctgggagaaagtcaggagagaacagcggtcctaaggcaagagcactgtatctgttagaacatgacagagtagtagggagaactttggggtagtagaatatctctgtatcttttggagccaggagttaagtaagacaggcttacttgtgtgcacatgtgcagacattctcaccaaggagtaactccccaggaagaaaaactggcagtaattctgcatcctgattacagtgagaaggttgtgtatctgcatgtgtgctaaaacgacacggatacatatcacacccatatcagattctgggccttgcttctcttctctaattgtgtaagacttagccattgaggaaggtactggggacctgtttgtattctcttcccagtgacttgtgactgtttagagaacagatgcagaaagccttgggcagaattggagataatacttaggcatgttatcaagagatcttgaaatctggtggctgttcaccccaattggtgatgctagacagggtggaaaccagcgtgagaagttgctggcttctgggaattttggggggtggagctcatagattgcgttgctgtgttggattgtgagtctgggagaagaaatgtacaacacggaccactggcaagctagacagactgtaaaaagaacccctagcacgcccagaagccctctgtgtgtttctgccaggaaacagagcaccaagcctgcttcctctaccctgcggcaccctgaccttcacgtctgaggacaataggagagcaaagtgagcactctcattaacctgcttgcgggcagcttgagttattttggcctcaccctggctcttttggaaagaagcatttgcttgataaacaggaagttgtttccagggctgtaggaagaacaaatgatagaaccaagtagcactctaaagggttgctggctctggttagtttggaagggcagacatggtttcaggccaccacacaagaccagcagaggtgaggctgcgctcaccttccatctcaggaaacagttttgcccattgcttgacctgccgtggtttccatcagctctgaagaaggagacagtctgcacagagtggaaaagtgacttattttaagaaatgttagctcccttcctctgttctattagtggcatacctctaagacgccagtgaggctgctggtctaggcaagcaaaaactggcctgtgtgttttattctttgaaaggttcgaacttgaatatccacagcatatcccacctccacttggtgccccagtagactgggacagagtgagagtgaattctgaggcaggtctgtgtgctagtgctgtagtgtttttgaactgcagactccattcattattctgtcaccctcagagggtatgtgagcctcagagtgccactgatgtttgaaagacttcatgggcgagcacctgaggacccatggcaagtgacctgccatgactggtaagtgggaagagatcctctgccccacttttgataagacctcaaaagggaaggaaatgcatttctgttttagctggctggagccatgttacagtaaagaacacttaaatcagcaccacatttcaacaataagctgccagttagtgctgggaaaggtcggcatggcagactttacatagcaggtgtctccttgatgtctgctgagggaaggaagggcaagaatcagaagctgatcagaagccaaggtctgggtacagttgagactctatcagggctggcattggtagccaagacacaggagagctagctcaccaaatggcctggaggaagttacttctagctggaatcctgctgaagtccagactgcttttctttgactgtttcactgtgtgaaagtgccccactgtagattcagatcctctgactgtgtaagtgtaggctggctactgttctgggtttctccctcagaggttaaatatcccatctggacttgaatatttgcttcctgcccactgagtctgtaggaacataaagcaaccatttgtcagcagaccactgaaaggcaggtttctacagggaatgaaactgcaggccattggtttcctggcacacccacctgatcttagactgagagcaaactaatgggtggggggagcccagtgcatgaaaataaaagctgaggctaaggtgtgaatgcacatgagcccagaagacagagctggaggagaggagcacagagcccagcgaggagcagcagagtcaagtgctggacttggggaagcctgatgtgccgcagctgcttaagtgacagccacagctacacccacagttacagcagtagtgtgtggatgtttgtagtcgcagttctgggtggtgtgcgtattccaggctacccagtatgctgccactgatgccttccgcccggaccccagagtgatgagggttctgagcagcacaggcagctgttggagagcttggagctcttcacaaaattcttaactcttccccgccatggcgctgagtgaacatgtaataagtgtatttttaaatgttgaaaattcaagatttgttatatatggtaactcttaagagtacaagtttatccccaaatgcaggagctttttcattggtcctggcttgtgacagttggcttccatttaacagagcaaggggaggtgaggctgttggcagtataaatgttttatccaaggacaaccaatgtgtcattgtggagataaaacagaactaggctgcactacactagcctgaactctataacaagtttgagaattttccaactattttagaaaaataaggtacttagacatttgtaaagaaggtttttttttttttttttttaaatgaaagaaaatcccttattttggaaatcacaaaatgaatcattctgtcttgtttgagaagctttgatgtgttttggtaattagtgtttactgccagacgaatgtctcttgggcattttaattagtgggtggcatggcccagtgagcttctgagcttctgatggtagcccttcagaagagttactcttgtgtttctcaagaagagcggcctcctcaaagctctttaattaggtcaagtttagcaactaaaacatattattagaataattaggcccctcttaagggaatggggggggtcagggaacaggtactgttagagcgggatcgcttaaaatctagtgtcctgcctctgatgaacgtccagttcctgggcagctgtggaacactgctgtcttcagtcagggactttctattcagagatttcccccacccccaccatggatctcaccagcagcctaagtatgctgggtataagctctccgttccattctggcctctgtgtgaagctgtctcttacctccagcctagagtcttattgtcctctcctttttttccctattaagttgcaagtaactgtgctgggttccttgtttgtttgtatttgtttttgtttttaagggaaccactttaaagatttgcgtataggaaacaaaacattataacagatcttttaagggttgtttgctttgtctatttttagtgatttcaaagtctcttcctaggtggcccaaagctggcctcaaacaagatgtcccctgcctcagcctcccaggtactaggatgatagcattgttgccacacctggcttgactgatctttcttagtagttatatacgtataataataataatgtgtgtgtgtgtgtgtgtgtgtgtgtgtcttctgtgtgtctgtgagtgtacatcatttttacactctagaatcatgtatgtcccttgctttcaaaatgcactttatatatcttctaaaatttgccatgtaagtggattcccctcgttgccatgcttggcccttctccctggttcttggctgtctttctctgtgtctttgcagttatctctaatgataacactttaccctagattctgttttcttacaagtttaaagaaagatagctatcactagtcctctgggtgaggtgtcaccaaaataattgagtgatttcagtgaaccactattaacagcaatatgtacattcatattgcttaatttttcacttccttatctcaggatcatatgataacattctgatggcaaatgagtccttcttcagctagatatcttagttaaaggactttcacaggttattggatattttcaacagaannnnnnnnnnnnnnnnnnnnacagcgggatcgcttaaaatctagtgtcctgcctctgatgaacgtccagttcctgggcagctgtggaacactgctgtcttcagtcagggactttctattcagagatttcccccacccccaccatggatctcaccagcagcctaagtatgctgggtataagctctccgttccattctggcctctgtgtgaagctgtctcttacctccagcctagagtcttattgtcctctcctttttttccctattaagttgcaagtaactgtgctgggttccttgtttgtttgtatttgtttttgtttttaagggaaccactttaaagatttgcgtataggaaacaaaacattataacagatcttttaagggttgtttgctttgtctatttttagtgatttcaaagtctcttcctaggtggcccaaagctggcctcaaacaagatgtcccctgcctcagcctcccaggtactaggatgatagcattgttgccacacctggcttgactgatctttcttagtagttatatacgtataataataataatgtgtgtgtgtgtgtgtctgtctgtctgtctctgtgtgtgtatctgtgtgtgtttgtgtgtgtgtgtgtgagtgtgtgtgtgtgtgtgtgtgtgtgtgtgtttggttggtttttcaagacagtttctctgtgtagccctggctaccctggaactcactctctctgtagaccaggctggccttaaactcacagagacccacctgcctctgcctcccaagtactaggattaaaggcgtacaccaccccacccagctagtatacactcttccctgctgagccatttcttgtcccaaggctgacatttataatctgttaactgtcatgatgtagagttgggttaaaggtatcaatgacgctggctcaggtaaacctagtaccttactctaaggtactaagaatatacttttaaaacttgctataatggctatggaaccaccaaattgtttttcagtcttgaggatagcctgatctctaatattatagagtctattacaggtgagggctttttgagaggggtgtgtgtgtcggggggggggggttaccctctattctagccacttctctattgatcatttttcttggtggaaacttcatattacctataaaaattaatattttagttctaagaagagcagatgcagatataaagatttatgtgccatggtaagtgactcaagtatgcttttttgtgttcgattataggactttaaaaaataagagaagctaggatggacagagctctacatgaggccaatcttccacagtgtagtgtctgctccagtctaaggattggttgctaagactctgctttttgacacactcttcaaacacaggaaatgcttctgatgcttatcttcatgtgtgtttgctaatgtgcatgtaatcttatgcagggggagttgaaaaggaacgtgttaagtgttataattctggaaaagtaccatcaagccctgagaacccttttccaatgtgtactttctgtttgtgtgtggttttgtgtggaggagggcaggggtccaagacagggtttctctgtgtagccatggctatactggaactggatctttatgccagactggccttgaactcagagatccaaatccctctgcctcccaccgagggagtgtgccaccactgccaggcacatatgtactcgttgtgtgcaccctcatcacagcaggctcaggcttaaagtggtttaggctcaggtgctagtgtgcttcattgatgtgcacaggagtgtgccttattccccttcagctctgttcaggctttgttggttcatttgttttagatgtacttacatatgtaaataaatgttttgcctgcaggtctacccgtgcaccacatgcacacagatacctgatacctgtggaggtcagaggaagtcctcagacctagagttggattaacaatggctctgagccatgtgcactgctgagctatctctcaagcccctctgtttactttttaactgttaactgatgcatactcgcttgcttccttaagctgcctgaggggctctgccagcatcttgggtgggtactgactctactcttgttcaccacagaccacttggtagcccatggaagaatggcagagaaggaagctcgacggaagttcaaacagatcgtcacagcggtgtatttttgtcactgtcggaatatcgttcatcgtgatttaaaagccgaaaacttacttctggacgccaatctgaatatcaaaatagcaggtgaggtgtgtgtgcacgtgcgcatgtgtgtgtgtgtatgtgctgaagacaggagtcatggttaaagtagggacagtttaggcttttttaaaaatgagagctggggcttgttcatgctgagggcacttttctcactgagctacacccccactccagacttcactttaataacctgaaaattaataaacttccaaaggacattttaaaatatagtattagcaggaactctttaggaagaaagaaaaaggtagtatttcaaattctattactttgataaatcctttgtcaataatgaggagtggactattttttttaaagcaggaaggaaaactgctgaaatgatgtgctcagcttctcctgccaaggctgtttgcactgccccagccccagccccagccccagccccaaaccccagccgcgcccattccacaggctgtgctttacctgcagactctaaagtttatttgaagctgtctcatcttttttaaatgagaaaaggtgggtttaggatatgcagattgagccgggtgtggtggcgcacgcctttaatcccagcactcgggaggcagaggcaggcagatttctgagttcgaggccagcctggtctacagagtgagttccaggacagccagggctacacagagaaaccctgtctcggaaaacaaaacaaaacaaaacaaaacaaaaaaaggatatgtagatcgtcctgagtattttctcctcctacatacatagatacctgcttccagctctcataagccagtgcgtgagcaactcaatcagttttaacctgtttttatttcagctcatcactcatcatgtcccaccactctgcctagctaacttgtacattccttccttactggtttttacttgttgctctgacctgtcagcatttgcctgacagatgcaagtccatctcctactgattagcagacagagagtgtatagcaactataaatagaaaataggtggttttttttgttctttgacagtttctattaatacattgtatgtccagaggaaaataaagtagtttgtgctgaaactgaagtattgtttgaatgtaaccgccttgcacagccaaggactcataagctgtcctcagatttccctgtaagcagggcaggagttgagagttcagatttatatcttgttccaggtcaaagcacctgagcaaggccctgccagctgtggtgcttctgtctcttagaggcagacctatccttttaagtcctaggaatagtgtgtttccatcccggtttcagactgacggctgtgcttgtgttctgaagctcacatagtcttccactgtgttgggccttggcatgacacagcaggcaagagtcaaaggctttctttatggctggagactaagccaggcactgtgactcgtcctgccttcgcctgtcaaaggacattactgtgcaggaaaccatggttttcctttgtcttcatgtcagttgtggctattcccatagaattaggtaatgtggaaagacctggcaatgtcaaaccttcttttgtaattaccttttttttttgtagcttcaatgaaatgaactgtaaacagcatatactgaagctctcagaactcagacatgtgacatgggatttgaaggcagcctggatgcattgcaagaccctgtcttataaaaaaaaaaagtgcattgcaacaggcctcttagctccttactgttggtgaaacaaattagcacaaactccaaggctgcaagcacggtggtgttctaagtcagctctggaggtcagtagaataaaaaacatccggttagcagctgtggttcctggaggacctagggggaaagcccagattcttgccttttttaccttgtagagcgaacctgcctttcttggcgcaggccccgtcttcacagcacttcccaaacttcatggttccattgtggtgactgttctcctgattcctggtactaaaaggagccctgtcattacatcaggtcctcctagataatccaagactacctccacagtttcctgatattgacttggtcacttccatagagagctcctttgacattcacgaggataggatgcttgccacatgggtgtgttggaggacacaagccattcccatgccatccccagagcccttcccatgccatcggattattaagtagttgaaagaaagcccttctttatattttataattgtattctgcatatgtgacctaagtttaaagtggttttttttttttttttttggttttgtattgtgttgtgttgttttatgcttggttcatgatttttacgtcagggccattctgattaagttaaggaaaattcctgtgtcaattagttttttctggagaaaccaaaaataaaagcaaaggtcattgataattgagactaaaattactgaaaaattagtggaaggtgattttttttttttttttttttttttttttttagtttttcgagagagggtttctctatagccctggctgtcctggaattcactttgtagaccaggctggcctcgaactcagaaatccacctgcctctgcctcccgagcactgggattaaaggcgtgcgccaccatgcagaaggtgatttaaaaaaaaaaactggaggtggggactggagagatggttcagtggttaagagcactgactgttcttccagaggtcccgagtttaattcccagcaacaacatggtggctcacaaccatctgcaatgggatctgatgccttcttatggtgtgtctgaagacagctgcaatgtattcatataaataaaaacataaataaatcttttaaaaaatttttttggtaagtcattaaaacaaatccaagcagttgcagtaagaatgtacccactggagtgtgagtgaagctgctgggacgctggcagccagccctgtgccctctgtgttctaacacataggctttggcacagttttaaagttcagtttaagtgtttacattagtatttgttttcagagcaaaacaaagactaaattgggactgtagttcatggttgcctacagtgctaaatgtttatctttgggtgactgctcatgcgctctttttttttccatgcccccattatgtggtttctcagtcattgctcgagcttggggtgtttgcacaagtattagatgggattctcatttacacttgccctatcttccttgaacctaatggatcactaggagaaatgcctttactgaagtccaagtagaacccgagtaacttcagagtggactgggtgataagtaatgaaatcaattttatttctaagagtgtaaagcaactattagagccctgttcctgtcagtggtcattttggataccatattcgaagccttaggaagaagctactgtatatgaaagacatatatttacaagagagaaaatgagctttttggttgtgtgtgtgtgtgtgtgtgtgtgtgtgtaagaatcatcttatatagctcaggctggcttccaactcaagagcctcctacttcagtctctcgctaggttataatgtggtcatacaccaccatctctgccattctgggggtggggaggggaaaagagtgttaataaaccaagccagagatgttatcagtcctggaacgcctatcttagccactagtgaggctaaagtagcagaattttaagtttgaggccagcctggacaacgtttggagaccctatctcaagaaatgaaagtgctaggcagaatgcttacctactttcaggtcctgagttcaatacaaaaaaaaaaaaaaccccaaatcctcagtctttagtccctcatctttaaattatgtgtgttaaggaacaacttattttggactaatacagattttaattatgaaatgtaagcagttaacatttttatgccagttatttatacaagtggtttttgttttaaaagcattctggtagctcagctactaaaggtatttgctgccaagttcgatgacctgtgttccattcccagcacccatgtactgggaggaggaaactgatgctgacaagttagctgtcctctgatctccatgcacacactatacatgtgttgccctccccaataaataaatagttataaaagaaagaaattgggggcagggtctcactgtatggttctggctggcctggaactatatgtagaccagtcctgcctgcctctgcctactgggatccagcacacccaagctgttcctgtgggtaactgttaacacttgaatgcagaggcaggataactgctgggaattcaaggctacccttagccacataatgaatttgaggccagccaagactacagagtaggatcctatctcaaataaactgtgtccactgtggaagatgagtaagttctggtttcatttgtattatatttgctttttgagggacttcctatcaatatgtgtttagtagttgatactacagatagcttactacataagctgtctatgtgtccctgctagtctagtgctagccctggtgaagaatatggtcccttggtgtgagggtaggcatgtggatagctatcagaagagtcagctgtaattctacacttcatggttttttatgtcttttcatttttctttatctgtttctagagagaagaaaaattcactatatagttgggtttttcttcctggttgtggaatttagaaattcatgctaatggcagtaacaaagctgtcttccgtagactctcttcagtgagtgtttgttgtgagtgaggctccagtatttgcaggcaaaagcaacatctggagctgaggatctgccgggtcagctggggtcttgtccattgtctttaaaggcttcttgttcaggtggctcagcagcaacagagcgggaaagggaaacgtgactcctgcccacagggatccgaggttctctggggccgcaaacattcagagtgctggcagttagagaataccagagtcgtgccacacagggcctttcccatgtatcgtttaatgcctttgtatatgtaaatacagtgtgttccaaaaacatgagaaccctttcatcttccagcggttttaacgtccaaaatggatttatgacccgcatccatgcaaacctcatcatgtacctgaggctggggaaaggaggggattattcgcttttaacccttcagtttccatgtttcagatgtgtgcgattctgtaataaagcagatagaggaaggaagcgcagcctaactttcagtccacagcacatggcagaggatgatccctggctgatagtgtttaatctcttcagctactgaattatatagatcatgtaacaagagatacgttccaacccattagtgaagcagtgtaatcaccatatacttccatagaccgaagaacacactgtagtgtgtaaaattccagcttactgggaatgcacaggatctgtaagtacacgctgtctgctgcctcaccccactttgtacgtgtacaagaatctcagtaatcaggcctctgcctgaggtacccatgcttccccatggtcagacacctggctttagactttaccttctcatccctaccaggtgggactgatgaagttaggagggctagagccaggctgggcatgccctgagacatagctgagcgccttaggccctccaagtgggcctggaactggaccagaggttggaccaagtttggaggtgttggggatctttccattgagtcctgtggaaggataacatattgtgaaccccaagttggcctgggaccaataccctaagttggcctggagattgaagcctgagtgccatgcaggagctagaatggggagcacctgagaggatctcttccctgggtcctgtactgtccacctcagagctgtgaagttggagaaggtggaatccagtcccaaggagtcccaggacgtcaaagtcctgcagaaagaactagaacaacttgccaggcccctcaagcagaagaggagcaccgtgaggtaccctcagaccaatgtagggctcaccctgggcattctctttgggaaggtattcagctaaatgaggtccttcagctcagcatcaggaacatttgaccccaggccattgctggagaagtggatggaaaagacaaccctttgggagatttgcacagcagagaccctagtgcagtgcaggcacagaaaagaagtagaagcatggagaagtgcatgtgggggagcaggggaacgtggttcggcaggcaaataatcaagcattgactgttcccaagagaggggtctgaggtacaggtcttctttccctggggcggtctgtgttctttcctctgccacaaggcccccattttggtgcctcaggctgtaggggccctcatttcaccatactctactcttaggctccttttcctgaggatgaagtcttcccctctagagatttctgtcactgctctaggctgtcccatgcgttttaaactggggcactctccctgccagtggatgtagggaacagagagagggaaagagctagaccaagagaacttggaggctgtgccaccagggcttcgggatgaagttcttcatttgctgaggaggataggagcacaaggtgatggatgaagatgaagttgagtgctcatgttgattaagctgtcacttatcaattaaataaagaagcctgggacactaaagaaaaaaaaaccctcaatagctttcctgattcagacttcatgctagtgctcacatagacataaatgccttactcaagatagaacatttgaggtaaggcttgagggacattgtagaggagagacttgcagaggctctgtcagcaaatatggataaactgcctactgtgtagtcactggttgaggtcctggggatgcagcagcagaagaaactgtccctttcaatatcattctgatgaggagagacacacaactcttaataaggaccttgaaagatgcaatctgtgtgatgtgataggctgatttaagcagagtagacaaagccttctaagccgaaggaagataatgcaaggccagagagagaagaggcgagtcaaaaggagaaggtcagcatggccagggctaagaagggagagagaacggagtgacggtgacaggaatggccagggccggttgcacatgccaggatgtgggattttattttggttctgctaggaagctgaggcccaagtgtaatagagtgtcatggcacatttgcagacaagctatgggaccagtcatacatttgacttctatggtgagatgggaggcagaaacacgagaatcactggaaagctattcggtcaactggcctggagttcacagcgtaacagaatcaagactgtctcggaaactaggaagaaggaaagaactgactcccaagttctgagctctacacatgtgccacagcacatgtggatgcatgtgggtagatgcaatattctttttaaatgatatggaaaccatgtgtaagaaatgggaggtttttttttttttgtcactaaactgtgaaattgcttgactattaagacataataaggaaccttcactacagatagaaaaagatttggggagaaagaagggcaagaagataaaaggaccagttaaaaacgcggaagtcacagacacggggaggtggcaagggcaaaaaaccaggaaaagccaatgatttccaggacatggtagcaatagggtgtctgagccatggagaaggaacttctcatcaaataattgtcagcaataaaaattatgtttagccatcaacagtaaatggtatgttcttgtttaatggtcaatacactgcagtttgaaagccatttaaatcttgttcccaaagattaagtagtgagatgtctatgtttaaaaaaaaagaatgtctaaaaaaaaaagctaaacatagctgacttactccctaaagaaaagagctttcaagtttcagacattatgagaatgttttgaaaattgtggaaacttattttctttaaccaaaggaagttggaaactttcccctttaaatgtccactcccagaatgggctccacaagacagtttccactcccgtgttagtgttttcgttggcagtcaggagacagcaaggaccttcagggtaactacagaaaagctggcccttcggggagggtttccagagtgcatgggtttaagagacagtggaaagttcgggcctcggcgcagtgagattgaaagagtggtgtttattaaaaatccaaacactttgtgagtcagtgcactgaccttttgcaatccagaagagagttcagagggtggaatccctggttgctgagaacggctgctctgtgctgtgattttgggactgcccggctgtccccagagagtccttccttatccctgacccaacactttatttgggttacccatcacacctttcaggctgataggccaggaagttgagagccagagaagaccgttgtgacctcctaaattcaggtcataattgaccctaacttttgctgtgtccctggaatggcatgtgacactcatgtagacggtgctaagtgattctggtacatgctaagtggttggaaagtaaaatgtgaaaaattggaaactggagatggttcagtggttaagagtgcctgccatgcaaccgtgaggactggagtcggggtcccagcagccatgtaacaaagttggctcacacttgtagctctggctttggggagccactcttttggcttcccacaagtacatagctgcatgtacctacatgtatgcccacatgaggcataaattaattttaataaataatacaaatagtaggaaaacactctgaaaaatgatcttttcgaggatcagagagatggcctagaagttaaagatgtgcgtgcactgctcttgcaaatgccccgtgcttggttgtcacacttgcattgagtgacttacagttgtttacagctccatctgcagagaatctgaaacactcctctggcccctgagggcaccacagtcctcaagcacagagatacatacacatacataaataaattttttaattaaaatcatttctcttaaatcttgttcctaagaatagcacaatgtaagtgaatatcaatattcttttattcaaaattatttgagagatatatatgtatgtatatatctgtatgtatttatatgaatatatatgtttttatggaaagagtatagagttaacattggaacattgtttcttgtcagtgtagttgtgtgttgtgaggtgtcaagaatgactgtgtaaggcctcttccagtgcagacagagctgcttgtcatatttttccactgtggtccccacacagcagagggaaaggacaacgggctggggtgagtcgagagcaatgccataccctgaaatgaccagaaacacttaatcctttgcttcatgatgtctcaaaaaaagataataaaagacagtggatatagctcagaggtagggtgctgcgtataatacactctaaagaagggaagatggggagaaaggaagaagtggtcaggcataggctgacatcatttgctgtgcagctagttcaagaccaccctgggataaatgagaccctgtttcaactaccctctctcccaaaatggtatcgattttcccttgccttttcttaggagctaattaatggagtagttctgtaggtcttcccaccctcctctgagagcctctgagtggtttaagtgtgtgcaccttcgggcaggggctgatggacaggctcctcactcagcacgtttcgttgctcgcttgtggtagtgattgccatggtaatctcaccaggaggtagattttccttgtattttgttaaatttatatgttatgaacccctggactatataaggaatagggaacactaatattgatgttcaaatgaatgagaataaaggattaattatgcagtgcttcaagattcacctcatgagattcattagttacttttttttttttttttttttttttttggtttttcgagacagggtttctctgtatagccccggctgtcctggaactcactttgtagaccaggctggcctcaaactcagaaatccacctgcctctgcctgtgctgggattaaaggcgtgcgccaccacgcccggcttagttacactttttatcacagcatcaagacatgctggtaaggctcaaaagccagacttattattgtttttaattaatttatttatttacttattatttttttaaagccagacttttaaaaaacacttgagtatagacagatgaacatacacacatgatgtagacagacataatcaattcagacattatatactagtagccatatatctataaatgtatacatactgtagtgcattcttggtatagtataatattatttattttgtttgtttattataaatcatggccccatgcttgctaatgcattttatcatttgcaaaaacaaaacacaaaaataattcagataaactgacttggtggtttaggttctagtatgtccactcaaaatgccgagtcattaaaagcatttacctattgtaattaattaatttccgtgtttatgcagcttttatatccaactgaaatgaatccttttcataaataagttagtgtgggtgctgttaatggtatcatgactctgcttgaaatttatgaaggacttttgtttttcttttatcaaatagaggctagcctcacactcaagattcccctgcttgggtttctggaattacatatgtgccaccttaccaagccccttaactagactgtttgtttctttgttgaagaatgggtaggagaattgagactgatttccatgtactacaggcctaaaccatttgatcgtaaatcaagcaaaaacaacagaactggggggggggggtgttattattgtttgttttttaatgtctttcttgggacgttttaagacatttttgttttaaaaggagttttttcctgggtatggtagcccacatctgaaattgaagcatttggcaggcagaggaataagattgcttcaagctcaaggccagcctggtagctggtacccatggtaagctctggggtactacagtgtgagttggagcttgcatgagggagggagggagagagtgactcccacaagttgtccttgggcataccaagtcatgcccccccaaccccaactaactaactaaatgcttttaaatgttggaaaaggaaaagaacaaaagagaatttgtgagtcgaagagttgaagaagactggcttcctacattgtgagacataaggcagttttccttgccttctaatctaagtagaaccttagctttcttggtcacatttgaaattctctgaactcttgttttgatctgaagttttcttccttccttccttccttccttccttccttccttccttccttccttnnnnnnnnnnnnnnnnnnnnttatgagaatagggtcttattctgtactgtagtccagactggccttgaacttgctgtgtagatggtgcaggggccttgaacttgtagcagtcctcctggctgtgcctctacatgctaagattgtaagtgtacaccactgtctctagctaagatttcttggcaaatcttgatagaattgttatataagccagcactcgggaggcagagaggcagacaaatctctgggtttgtggccagcctagcctggtctacagagtgagttctaggccaacaggaacaggatggcctatacagagaagcctgtcgaaggaagaaaggaaggaaggaagaggaaggaagggaagaaggaaggaagggggggggagaggggaaagggggagaaactgggcaaagggaagcaagtcaccttcatttcttacataccagttgcaccttcatgcttaaacagtgatcatcattctcttctcagtgtttttctcatccacagactaatctccaggtcattgaggacatgtctgtcttgtccctattgttctgagagcactttggtggagcatcagacattagaagtacttttctattaccacatacatctctcagggttacagctgtaatgtctctggtcaggtgaattatgttaatctcttagctttgacctaagaaggcatttttttcacttgcttataactccgaggctatacctttgagctctctaaatgccactcccaccttccgtattgggtcatgtctgaattatatttatcattgtgtgtgtccacgatgaatgtgtgtcactgtgcatgccaacgggcacctgtagaggtcagaggacaactctgttgagtcggttttttccttccaccttcacatggtttctagggaccaaactcaagttaccaaacttgctccatcacccactgagagccttctccctggcttcatagtgtttgtttgtttggttggttggttggttggttggttggttggttggttggttgattggctggctggctgtggttgctgttgtggtggtggtgttggtggtggtgattttgagacaggatctcactgagtagcagtggctgtcctccaatatacagagagccacctgcttctgtatcctgaatgctaagattaaaggcatgtgccatcatacctggcccttgatttttaatttgaaaaatactgtatttaaatactgggttttgggctggtgagatggctcagtgggtaagagtacccgattgctcttccaaaggtccagtgttcaagtcccagcaaccacatggtggctcacaaccatccgtaacaagatctgacgccctcttctggtgtgtctgaagacagctacagtgtacttaaatataataaataaataaatctttaaaaaaaaatactgggtttccatttggtatcattaggttctgtttaaaaatgaaagaggtctttattcattgtgctctataaaaggtgtactaaaacttctgagtaatatgctcacctgcaagtattgggaacacactgagtggacctttgtggctctaatttgttgtgacttagaattctgatgatggcatgcatgttactattcctaacagtttcggtgggtattgtctacatgtcttatagaaactgtctgatgacagcaccttttaaaatggactcatttaaacaaggagacttctggtagggcttttcaattttgctttcttatggtaagagtggggttgccaggcagtggtggcacatgcctttaatcccagcacttgagaggcagaggcaggccgatttctgagttcaaggccagcctggtctacagagtgagttccaggacagccagggctacacagagaaatcctgtctcgaaaacaaaacaaacaaaaaaaaagaagaagagttgggtagtagtatctgcagtagtgttgagattggccaatttggtgatcccacctgctagtgcatgttgggaaaaccccataagttcttcatcataaatgccatttccccatgaagggattttccctgaatgtgtgtttcaggccgtgagtctctcattacttctttgttagcttctagtcagtaagttcagccaggggttgatgcaaatgctaaacactaaggattcccctaacttttcttcaccgtgaactcattgattcctggaagatttcaaaatcacctcatcagtgctgtgtgtgatcctacgatccacactgccttctgttgttttattcattaaagaagtaataatagcaaccaatgcttagtgaatagtcttgtaggcgacttaaagaactagttctctttctttgctgtatgtcatattagcagcctgggtaacaacccgattcttatttatataactttttccactcattttggtctttattatttttgagtcatctctaacaagccccctttctctgtaagtccatggagatctcagacaaggaccagagttaactgtgcgttggggtgtttgtctctggttgtaagttgtcctcagaagattacagctttgacagaatgagggatcttgtctcagtgcttcctggtgcagatggacacttggaaatacggatatatttccaatttattgtcctcccaagctatactctccatatatatatatcttgttgagtctggtagacctcttaaatctttccctctgagtgtgtatatatacatggtgtggtgcgtgcacacacacacacacacacacacacacacacacacacgcacgcaggaagggaagtctagctctccagaaggcttggctgtcagctgcattgctttgggagcaccgagaacactgacactagctgaaggctctgccccgtctgctcacatctgctttggattgttccttggtcaaccaggaaagatgtccttgttattgctctgaagtggtggactgaacaagaaaatttgctcttggaattgtcccgatttttaaattagtgccaccagccctcctctcttttcccaccatgtttcacatacccagctaatgatacgcttattttaggatacagtatcactaccttatatagcctcaggcgcctcatctcgcctagaacaaagagtttcaaggctcaaaatcaatcttggcctctggtatttaaaccatcctaggcgatgaacatagggttcaaattaggcctctgctttgtattaagagaaaaggatgtaaattgccttttgagcctgcagacaaatgctaactaaccggggtgttgggggttggaaaagacacttaacaaattaagttgagttgcttaggagtggagaaataaatgaccataggctccacccatatggcttctgctgtgttgggtgtaactgctgtatccagtgtaaccaatttcctttgtgtgtgccaccacacgtgtgtatgttcatgtgtgtacaagtgggcatgtatctgtgtgtatatgtaagccaacggatttcactgggaattgtttaagtgttatccttctagctacctatgaacacagggtctcttactggagcctgttaccccctgattaatcggggatgcctggccagcacacttccacacccgcctccttctccccagcaccggatttagaaacatttgtcattacatttagctttggggaatcttaaactcaggtccccttgcttgcatcgcaagcatttcctgaatgagccatctctctagcccttagtggtctctttctgttatgactttgatttcttttgtttgtttgtttttaaagatttattatctatctatttatttttatatgagtatactgcagccgtcttcagacacacactagaagagggcatcagatcccattacagatggttgtgagccaccaagtggttgctaggaattgaactcagtacctctggaagagcagtcagtgttcttaaccactgagccatctctgcagcccacgactttgatttcttaggtaaaaatctttatgacatttatcacctctggttgagtctgtaggccataaatcttttcctatcctctgaaaagggactgctggctgtctccatctattattcaaggcgatgctttaagctggacatccagtgctcacctgtaatctcaacatttgggagcccgaggcagaagaattgaaaattttccaacatggtctcaatctcccaccccaaaagtaatattttaacatctgtatatttgaaagagcatagtgaattgtaggttcatgtatgcttacccttggaagtgtaaatgaaagatttctaaacattgcagatataaccttccctctaagatactggtcattctgaaatcatttcttcccggggcttgttttctgtatacagtcagcatatctacaattatgcttttccctttatgtcacctcaagtatccgatccaggatgctctgtaaaatcaccgtgtgccatgttgcatgcaaagcaatgtacaagtacaggtaggaagaatctttgatccaccctgaattactgcatgaatatccaaattgctcttccatatccaaagcccccttcatgacgttggcttcagcgctgcacacctcccgctttctcgggcttttaggatgccctgtaactccaagtatttacttgcccttgtgagctcatcagatcccatttgatccgagtctttcctctgcttccgtttgtatgtgacttgtatggtttcactgtggtgacattgcaccagagtttagtctatggcattctccatcctgggccacatatgcctttcagccataatagcagagataagctaaggtcactgtctagtgagcccagccgcagagcgacacgtcctggcactccaggttttccaggtggtactggttctggggacgcagggaccttttctagcacagaacatgtacttttgcagaagtggctgggctatgcttctgctaactccagggatatcatgcatgacttaaaaagtatagtcggaaaaatgtttttaaaagttctgccaaaatctcatccacttttagttatctaattttttaaaaactctatcctgagttttcttttttcttctcgctgtccatttgacttgacccttaagctagacatgctgaaagaaggatgccaagtccatagtgacagacagtggggagtggatggacgcctggtgctgggatggtgcttagtacagggagggcttctttctgtggtaaagtactctaaatccaccctggttacccaattctgaacgtaccaaaagccactgtcgatgccccttaattagatgaaattataaagtgtattataaagagtggatctctgctgagcatgtatcaagaagcacaggatggtctcatcttgtcttatagaacttctcaaagccgggcagggaggggagggaagcagaggcccatagcacccagcatttagagctgagctcatttcacctgatgcagctgtgcattctgggtagtgccacaagccccacgcaacacccagggcagtcccttcatagtctcttgtattcacttagcaagcaagttctgagtgctctgtgcttgatcatgttcccctccacccccattcagtttccagtccacttttctctctttaccttcccagatcacctaagtgtgatcttgggtttgttttaggttttgtgtgtatgggtgtgtggtgtatgtatgatatctacatgtgcacatttgcacctgcactaggaggccatcagatgtcctgctctatccctctccattattttgtttgtttgattggtttttcaagaaagggtttctctgtatagccctggctgtcctggaactaactcgatgtgccactactgcctggctccctctccatactctttctctttctctctctctctctcaagatttatttatttatatgtatattattaagatttatttattttatgtagctgtcgtagacacaccagaagagggctcttaacctctgagccatctctccagccacacacacacacacacacacacacacacacccattctcttcagacagggtttctcactgaccctgcagccgacctggcaaccagcaaaccttagatttccccctcctcagcaaatgccggttggctacactcagccttttagtgagtgcttcagatttgaactcaggcttgcacaggaagcaggcttcatgctgagtcatctctctagccccctgcttcctttttgagtcatccctgagatggtgtcccttctgtagggattgtcatactgcagtatcccctgcaagtcctccagacactgatgttgaatgagtgtgtgaagagatggaggcattcatttagagtcctgtatgaggtgctgggagtatgcagcagtaggcagtgtgagtagcagaaacagcagctcctgagcccatgtgcctttggaagagaaatcataactttttaggtacaaagtaactgatcaaaccctggctctgtgccctgttgttgttgctgttgttgtaaatcttgttgatatttctgacccaagccagtgagaatccatccttgttttagtctttgctttatttttgttagagtttttcctcctgtgttggttgatatttagtttatttcagttgtctgtcctataaacagtaaaggctgctcacccacgtcttcccgcccctgcttcaaccacacatcccagggtccccctgctacttcactaaactgccaacagttctgaaaaatagccctctgcttgaagtgtgcagaagccgcccacaacggtaagcagctaagagaaaccagagcacatatttcctccaactcattttttttccagcccctcaagtatttgttagagggagctgagttttcaaaatgagttccaatgttcccgtgtgttaataatttgaggtttctcctgcatggataatttaaatgttcaaaaccaactcatgctaaagttaaatgcacattgaactagccgtactcctagcttaccatatacatggcagtgatggagagggatgtgaggtaaagagccactggcagggaagatggccacacagtgctaaggaaacctcgctttacagtgatgcattgtcaggaaggatgctgggcctgcccctgctaggcttggaaacttaaactgcgtttaaatcatctttcacagcaccaccacaagtgtcccactgcagattcttgttagtgatgccagcgagccctccgcactgagctgcctgggctgacctcaaacttcgagtcctcctgacttagcctcacctagccggggttacaggcttgtgccatcaagtctagggtctgttaagatttttaacaacctatcctacttgcttatgaagagtttggacaattttgctcactgtgtgcagactgtgaggtgtaattggacattgaaaagattggtggtatattcttctagtcctagcactcagaaagtcaaggcaagaggattctgagttagagaccagcctgaactacgttacaagatttccttcagcttaggctgcctgtgtggccatagggagactctccagcaagccatcaattggtatggcttccagctgatccatgggcatggcttccaatgtgttctccttcagaagcagcatctgctgtttgtttttgagacatgatctgactgtgaagtcctggatggcctggaacccataatggagaccaagctgacctcaaatccacagataaccaatcttcctctgcctccagaatgctgggattaaaggcatgagttaccatgccggtccataagcactatttcttacacactcactgtgctcgaagaaatgctaagtatcatgaaagccaggaaagaatagtagccttttttaaacatgaatgctactctcccaccctcccatctcttcggcccctttcatgtccccccactccttctcaacttatctcctctttgtaccggtgtgtgtgtgtgtgtgtgtgtgtgtgtgtgtgtgtgtgtgtgagagagagagagagagagagagagagagagagagagttacttctgaccacttgggattggataacccttggggcctcacctctgtcgaagagaagactgactctccctctcttggtagctttaattacatgcagctcttcatctagaggtggggccttgtgagattccctccatccatgcatgatggcgtgtcagctgtgtgtgttgtcattggacaggtctccttcagcaactctaataagtagttctacagaaactacggagaaagaatagacttctctaagagaggtagagtgtttttaaagctgaaagaattacacacacaagataaagagtcacaggggagtacagagaaagggggagggggattgtcttagtcagtactctatttctgtgaagacaccatgaccacagcacctcttatgaaggaaaacatcttgttggctggcttcagaggtttagtccattagccttagggcaggaagcatggcagagcagaggcagacatgctgctggagaaagagctgagagttttacatcttgatccacaggcagcaggaagttacagtgactttgacttctgagacctcaaagtctcaccccctagtaatgcactttctccagcaaaaccacacccatgccaacgaggccacacctcctaattgcatcactccctatgggcctatgcaggcagtttttactcaaaccaccacagtgatctaagagacttcacaacagggtgtttatttctgttgacaaatggcactgttttggctgtatcagaccctgaactaaacccctggtgatcagtaagctactagcttcagcagcttgggtgagagaggttggagatagaggttctcgtaggtggccattgacgcagcagtgtgagaaggcaccagtcagtgttcaggagcgactgacacagtaatttaactggctcatttttgtgaacctttctatcgtatatcaaagattctgtgaaaagatgagaacaaataaacctctttcctctccactcagtagtcagtagaaagcttgaacacatcatatagctaagaacaatgtaaggcagagtggagactgggatgtcagagaataaacaaaaggctctgacaaccaaaggaagcaactgatatggtattttctgctggaaatcagttaaagcttcatacaggaagtaatatttgactgcaccttgaaaacggatgacattttaaaggtgggagagacaggaacaggcctggcacagacaggaagtatataaagaaaggcatataaacacaggatgtgggccctctagtactgaagattagccaggggtactcaggagagctgggtagggtggggctggctgtgatggaacttaatgacaatgctaaaatagagagctgcctcttttttttttttttgagcaaagagataacaggatctgattttgtatggcagccattgagctctgagtgaatagcttaggaggtgtaaaaggtaagattctaagcaagaggggctggagagatggcttagcagtccagaacacttgctgcttcattgtgaggaccagagttcaaatccctgcacctatgtgagacagctctcaaagaggctgtaatgccaagaaatccagtttcctccgctggcctttatgggcactcatacaaacttgggcatacacccacatgtaaaagtatttttttatcccctgatgtaaatgttgcttcggaggctattgcctctgtctgctaacctagtcctggaagcttctagcctcagtacgacctaatctaggcctagagtgttttcagcccctgagacttgctgctgaataagctcaccctttctagttctttctgagctgtagcgcaaacactctccaagctgactgattcaatctggctcccccgccccctccctccctctcctgagagttaggcatatcctgttctgtcaaatcattctctgattcatcactgtgtcactttgccactcaatttgacatcactttccacatgggcacttccttccacaaactaaacttaaccttcattgtttgagattaaaggtgtatactaagggtgtgtctgtgtccatccaggtagattaaaggtatgtgatgagactgagccacaccacaactagaaataggattttccagtaaataacacaatcgcagagttcacagtgtgatcagatatcctgcaacacccatacccccacacacatgatttttgttttaagttgacagatggaaacaacatgggaacaaagccagtgtattttcttttaagattttatttctttattttatatatatgataagtacactgcagctgtcttcccacacacctaaagagggcatcagatcccattacggatggttgcgagccaccatgtagttgctgggaattgaactcaggacctctggaagagcagtcagtgctcttaacctctgagccatttctccagcccccaaagccagtgtcttttgtaacagagcatgcaaagatagtcttaaccagcaggtcctccgtgggagaattctctggctagttagagaaatgcacagggcagaaggagaagggcaaaagagttggagaagggaaaggggctccagggaggtaggtatgtcgccttaagattgctgcagggaatggaaaaggcagggagagtgccaggagttcagggccagccagggaggctggggtgtccttggggtagagtccatcaattaagaagttttccagcatgggtctcccctccttcacctttcctctgtccctcctctcccttttccaggtgcacatgaacaaggcaggtgacccagtcccagcgagctcagatggttcactgcctacttcctagatttgctctttcagcctggtgacacagctctgtgttccgctaaccagagaccagtgcctgctgggatgctgacatgagtgttgttcccttgcttctctagactttggcttcagcaacctcttcactccagggcagctgctgaagacgtggtgtggcagccctccctatgccgccccagagctcttcgaagggaaggaatatgatgggcccaaagtggacatatgggtgagtatgtcccgtcttatcacctgtcccctctgcagatgacagctgtcctgtcatgtgggagtgcagagcacgttcacctgcacttgcaaccccagtctcccccagcacccaagtcacatgagccttggctttcaactactccctttgcacctgcagaggacccctgtgagggcctgagcagaagatggctgtggcaacaacagagattaccttttcttgagaggctgggtctgagaaatgtttggaatctcaccctaaattcatgtctggaagcagaaatgttacctgctctgaagacaattgactttgacactgacccatattatatcctaaaaagaggacaagttggtcccatcatctgcacatacactaatggtctcttttgtttcctccaatgctattaaccgtccgtactctctgtttgggctacagagccttggagttgtcctctatgtgctggtgtgtggcgccctgccgtttgatgggagcacactgcagaatctgcgggcccgcgtgctgagtggcaagttccgcatcccgttctttatgtccacaggtaagggacccgccagcataaagccatgactgcattcacggagaggcaggcatgtggagtaatttcacaagtgcagtgatgctgggtcagtggccatttggctgctctctaagctgcagctgcctcagctcgtccaggaggcaaggttccttaggagcgaaataagccacctgctttggcttggggatcgggctctgctcagtatcaattcatctgagctgttgtacctcagtctaagacggctaaggctttgcacggcccctggcatacagattagattaactgctgtgtgagtcactggtgccatcatggtgctacagtggcatcagtgcgtgtcacctgtcctccccacagcctccactggagtgccagagctccgcggttggcactgatgcccaggacaaagcaggctttcgtctttgtcttcctatggtctcatttcctagttctctagttctccttcagattctaactatttaggaaaattttttaagtaagcagacaataggataatagctttttggaaattttaacactgaaaacggataccagaaacccagatgttatagttagcagacaactcagaacctctgggtttggcttcagattgggatgtgtttagttggttggtttgggatttctttgtcaccatttctgtgcatgtctgatccactatagacagtgttaccttttgtctagctactttcctcttaaggagagcatgcacacctttagaatatgtaggtggagtgtgggttccgtttaactgagtcagctcagaactgatgacttagaaggtcatgtgtcaggtgatgataatgctaaggaaaggggaagaagaaacctttagaatggtgggtgggagatcgttcaaagaggaacagttggaaaacgtgacatttcagggacaactggaaacgaaggatactggaggattactgcccgaaggccccagggagggagcaattggggtgtgcctgaaaggagttgagcatgtagactctctgcttttactctgctggaatcggaagaattagaagctctcttaaaaatagagaataatatggttagacctgtgggggttttctaaatttttattacgaaaactttttaaaaattgaaaagatttttttcatcagcttttaaagacaatccctgtagttgctacactgcttgttgaaaggagagtgcagtgcagtgctgtgtggtgcagtgcagagctatgtggagtagtgcagtggcatgtactatcacgcaacacagtgcagtgctgtgtggtgctgtgttctaaggcacagcacagtgtagtgcagtgttgtgttgtggaatgctgggcagtgcagctcagtgtaatggagtgttgtgcagtgcagctcagtgaagaagcctggttggtaggagacttagagagcatgttcccagactgaggaatagagtgatttgggacggatcgctgctgcacactacctggttgatgtgtcagaggaattttacagacattagctcccttcagtattatgagctatatgaggttgttaccccactttgcaggtggtgccacatccaggagagtgtaagcagtgtccccatgtagaacagcttattagtggctaaactagaatttgagccaaggcagtatgtctcaaataatgtttgatattgcatttaaggtaagaaagaatagttacaggtaaccccgagatttgtacctgagcaacagaaaggatgaatttgctactaaatcaaggataactgaatcgtcaacattttggagagatgtttttagaaatgtcaagtttgtggtgcctattagccgtctaaaagactgttctggtcagcagttggaaaggagagagttgtaactgtcaaaactggcctctttgagtgtcatagaatatactctaatgctaccaggaaggctcgctctctgtgcctctcaggatggttagagatgaggaaggtgacaagggccagaagaatggttagggaggaaagccagagtcacttgaagacaagtgaagctgccccaggaagctgaggtagaggacagagaactgagtgctggatttagaggaatggagctccctggtggggtttggtgccactgccacgggaagctgatccatgcacacagtaggaccgagtgcaaggcacaggaaagggggaagccttgactcttcccagtttgactgtacagtgatggagacagagaagtgtgctctggggggctccaaccctggtcatcagatgtcctgccagtagctgcatttcctgttgtcatggtgactgcattttaccattccctactaaggaaaaaaatgaggacagttttaggttcactgcagaattaaagggacagaagatgttcatatgccccctgcctcacttcccctcccacacacatacacacacacatatgcacacgcacgcacgcacacacacacacacacacacacacacacaccccttcattcagagcctgtcatttacaagagggttcactgtcagggttgtaaattcgctgggctctgacaagtgtataaaggcatttatccaccatgatcctgtcagacagagagccccacctctgggatgatcctgtgtgctccccccattcctcccatctttctctccccactggtgatcatcgtctccatacatttttacttccgggatgtgatatggttggaagtgccgttttacgttggccttccacttaggaacatgcacaggcatgcaatgtctcttgtgtcttgctagctcatttccctttactactgagtactcccttgcctgaatgtactacagtttatccttttgcccactgatgagtgtcatggctgctctccagttttgacagtttgtaactgagattgctttgatagccttgtgcggatttgtgtatggacacacgttttcggctcacttgagtaagtgccacggagcatgcctgtgaggccatatggtaagagcttgtttagatttgtagtagactgccaaacggccttccctagagctgggctgtgttgttgtaaataagagttcttactgctgcccgacttgcggcttttgcctgattagcctgtggggcgtggtcccctttcacatgtgtgtggtgttcctttcatgtgtagttctgaagtctgtgatcctgaacatccttgtataggtgtctcatcaggtcttcattttttattcctctccaacaaaatctcatagtgtttttccaagctgcctttgaactcctgggcttacacagtcctgcctcagtctcctgaggatctggaattgctcgtttatttattagggtttttcactgtcttctaaaccccattgtttcttactgcttctgagatccattccttctgtcccctaagtatactcttagtcatctctgccagatttttcgttctctcttaagccttacatctcctcttacccaaatgagctgtctgagccatctcgtttactgccatggcttcaccgatcccttttggggactgctcccaattaactgtctccaaattctctcctgaggtctagggccacaaatatccatccatttgctatttagcatctttaaaaaaattattttccttgttttgtagtactgagactcgaacccagaaccttgagtatgttaggtgggcaccctgcccctgaactacaacctgttactcagtgtcttcctttaacatcttgaaatcacattcactgaagcattttccaaaatgaactttattccctatccacagttttgctctatttggtgtccctggtgtccccgtctgaggcttggcagaaacaagtcttgattgtttcttctcttatcaccaccagagccaactggttagtaaaggctgtgcagtcagtctgctattccagtaaccatgctgtcatcttctcttgcctaagttagactttgtcaaatctgtggatgctgagttccatccttgtcttctccatgtttctgcgtgaccttggcagacacgaataataaaaactacacctcacatgcaaacctcacaggtacacgcatacaaacgcacaaatctgatgatatcattttatagtttaaaaatgtttcagcagtttaacattgccctaaagtttactgctaatgtgtctaaagcactgaaattcaagaatttttactacagccatgataaaaaaacatactttatactataacttagaacacacacatatatgttttcaaaaatcaaaatatattgttttgagacagagtctctttctataacccaggctgattttaaactaaagaaccatctcgcccagtctcctgagtgctggagttgctggcagtctagcctgatcgagtgctaagccgatgatcctgagggtgatggtcaagattgttctctggcctacacacgtgcatattcaagaaaaggcaaattcagatattttccggggtttttatctttctgaaccttgtcttactactatgacatttatcaaaatatactgtaattggaggctagagtggctcagcagctcagagcattgtctgctcttccagaggtcctgagttcaactcccagcaaccacatgatgggagctgatgccctcttctgacatgcaggtatatatgcaaagtcatgtacatgagaataaattggtttttcgagacaaggtttctctgtgtagccctggctgttctggaactcactttgtagaccaggctggcctcaaactcagaaatccacctgcctctgcctcccgaatgctgagacacatatattttttaatcttaatttatttcttattgtaattgattctttcattataaaccttccacaccagactctgaacttaaagaatatgcagagaaagcctccagccttcccacagttgtttataatctagcagtgtctggtacacagcagcacttcctacatactcttctgtgtcagagtcaactgcaccgaccttgtgttccaggggctttcattgactcttaaaatcaggctgctggtggtgcaggcctttaaccccagccctgggaggcaggtagatctgttcaaggccagcctggtctgcatagtgaattaagaccttgtctcagcccggcggtggtgatgcatgcctttaatcccagcacttgggcagaggcaggcagatttctgagttcgaggccagcctggtctacagagtgagttccaggacagccagggctacacagagaaaccctggtctcaacccccccccctcccaaaaaaagaaaagaccatgtctcgaaaaagaaaaatgagaaatgtacacaattgtgacttcttctgtagcacctcacccccgccccctcccccagtcctgttttctcttgttctgacctcaggccctgggctttagtcaggatagtgtttgtcctttctcagacatagcaagcacactctgctgtcccctcaggtgggcactctgaggcctctattgacaccgccctccccactgccaccaacagcttccataattgtgtttgtcttaacccttgtctcagctccacatgctctaaattgttttcccacctcccatgtcatcattgtcgttgttgtcgtcatcattgtcatcattagctggcagggatgagcggttttggataagttttgttcactgctatattcccaggccatggggtagtgtctggtgtctaaactcataaagatgtattaaaggagggaactcatacacaggtttgttaaaaatacagtctacgggggtgggggtgggtacggcccaccaaagcccttccacaggaaatactctcactcaaacaatatcaagaaattacattgtgcgtgtctaatctcagcacttgggaggtgaaagcaggaggctcaggaactgaaggtcattagctgctcagtgagtttgagtctagcctgggccacatgagatcctgtttcagtccttgctccacccttaaatacacacaaaaataactacatttctctaaggctagagtttgtgaagtattttcctgtatttcgtctgctttaaaccctgcagctgtgctctggaattgttactatatactattttcctgcttgccgtgacgtgtagagaagtgagttgccttgtaaaagccacacagttcaccccagtcagccactcctcggatgctgtattgttctgctcaacctcactgttataaaaaaggggggggcaggtcaataaaccacttcctctgcttttccagtgtccacagtatttcctgtgaggagtttggatatcctccatcttccaccccagcctctcagaccatgcaaggctcttcaggcctccccaaagcaggctgctgagcatagctcctggcaaataacctagctgctgaaaccacgctcctagtgagttatcatgagtgctgaaaggctctgagaatggcagcgtgattgtcccaaatagtgatactgtataatcccggagaggagattccccaagtgaatgaaacaatgctctgtaagatgaagcacagaaagcaagaaccagtggaggaaaagagctggcggtcaccatcttactgcatgctcgttctcatcctcagcgatgtgcatgtgcttagctttatcctgtaccatagacctgaatcccaagactcatcagaggctggtactatccatatggtgaggcacagaggaaaaggaaatcataggatattccttcaagcatcatggagttcagtttcaagggaagtacacttgagagtctcacccggggtcctctttctgtctctgggcatagctgtgactcactagacctggaattagctcttcctgtggaggtcgaagctgtcaggtctgctctccctctttgtgcttctgtctctttcctatagagggcagtgtgggtgaaaaacaagacctgttctctgctgtcaccaccttggcctgagcttactgatttctgtgaaaagatgtagaaactcagtcagggctgagagagctttccacattagcctgtgaaacactagaagatcctttcctctatcttttatggccaagtcagactccagagtgtctccagctgggagatcagtctctgaagatggacactgtttctatagtaactgtgggatgaagttgtcttctcatagtaggtcaaagcttgttagacacgagtgttcttccatagctgtcctgagatcaactaaggtcacatattgttacatggcatttgtcatgggctaatgagtgtcatgagtgggttttaactacctagtttattatggcctaaaacaaccagatgtgttttacacagctgcatcttctggaacctagaggcacctggcaggaattacatgtcttttcagtgacaattttgaatgaaatatggaaggaatcacaacgttggtcttatggtggtggataccactcaggagacaaaggcaagcagatcctgtgaggtcaaagctagcctgctctacatagcaagttccaggacagccagggctacataatagaaactctgtctcaatgtcccaacctcccaccccaccaaaaaaaggaaagttgagaaaggacttactacttaactgtagactctcctgtcgcttcggcattgtactattaaagtgagaggtagctccccaccgatggttggacacactcaggaaaccaattggctttataatctcttgttattattttgtagatgactagatcaagtgacttctggttagtttgcaaaggtattttgagccagtcatcccggcactcaggaggctgaagcaggaggaacataagtgagttggacaccagcattggttacataggaggttggaggccagacggggttacataatgagaccatctcacagcgaaaaacaaaacaaaacaaaacaaactatttgatttactgtaatttggctctcctagtctctgataaatcatgtttgttacaaaccatgtttgttttgttttgtttttaaggtttatttatttttattatgtataaagtgctctgcctgtatgtattcctgcaggccagaagagggcaccagatctcattatagatggctatgttggaaattgaactcaggacctccatagccatctctccaggcccagaccagtgtttttgagtgaagcttcttggattgacccagagctcagagctgtcatccagggagcatttcagcctttgccacaagatgataaggggactcatttccttgagctcatataaaatgagacctggtctagccagtgtcagcagtggccacatctgactccacccactgatggaagccagcaatatacacatttggttactagattcactccctgataatacatttttaaacccttggatatgtgttttgccttatcctcttgttaaataccacctatgagcaaatatagtccaaccatttacttaacggaaggaaaattaatttaccatgaagaaactgcactgatgctgagtgcattgagatctcttgtgggcaatatttttgagtccttattgattagacttcattgggacttaattagctgtaatattgcataagcattttatcactgggaatgcagatcccacttacataatgcttctgatggagaatatggcctacagctactgccagaaagctttcacttagaggaaggtaactctgccctatccgagtacccatcaagaaccacacagtgtctccctgggcgaaagcactttgtggagaggagcaagagtgggaatgggcgtcacttgcccgagctataagtgcagaggcacgtctttggaggtctgctctccatccagggagaaaaacctgtggtgctttggtgtctatccacctgggaacacatctcaaaccagagagctgggtgtggtgccacacctgtaatcccagcacttggaaggcagaggcaagagaatcacaagtcaccctcaactatatgtaagtttcaagggcaacctggggtctatgagacccattttaagacaaaacaaagctagacctcatccgagtgaatcaggcctcgccctagtcccatgagtttatctaagtttctagaaagccagggatgaaggtccttgatagtgttccagttataactatacctttcaagcaaactgttttctgatttatggaaagcctttatagaagaataaagaaaactccaagtagaagaagcttgattccagaggttgggtgataactaactttgggttcctgtgcactaggcacagttgatttaactacttagttctcagcaggctctaactatcccgtgagatatgctgaatgctgggttgtttgattggtataaaaatgaaggcatagcaaggataagagatgctcacttagaaaatgctagaactaacctttgaaccttagccctctgaccccagagagttcctaaccattctcagttacagttagttctcgtaaatagatacctggtaaggttttcagagtatttggagagtcctggagaggatatcaaagaaagcattaataggaggccacgagatggcagtgcaggtaaaggcacttgccacaaggcctgggggcttaagttcacttaccaagactgcccctgccccatgcccacctacactagagcttaaatacacatttttaaaacttcttaattaatagcacatactttagactctgggagatttctagctccagccaacctcttaccaaagctgtcttggttaaaaaccaaaacacaatgctattttaagaatagatttaacttttcattatctgtatagagatgatgacaaactttattttctgtttatagagaaaagtggcagagccaggtttgatggtgcatgtctacagccccatcagctggagggatgagagcaaactagtgccagcctgggctatatagtgagaagtagtttcaaagactgggaggggaagagactgagagaccaagccaggagggaatctgagaggatatgagaatgttttatttgcggttttctttctggaaaaagtagtcagcattactgagacactgagtcacaaacatctgaaggcctggagcgcaaagcaccagactcctaaagccatgtagctctctgtgcagaggctcctcacagcccctctccatctgcgcagccagctctcctgttttgatccctgacctggtcagagcttgcgagtaacagaagctgacagcagtgtgccagcttgcatccaattctgacacgcagtttaactgtttgaagttctgaaagttgttcattatccacagaaagggatgttttagagattggactgccggttaatttttgttcccattttggattttgagatttagaaaaatagagctgtctaaaatttggattgctataaaagcaatctataactaaggagtaaacattgatgggaagcatgctaaaattgtccaaaatatagactttggtgctgaacacttgagaatcccatatgtatttaaacatatgtattgagcatatgccttgttgactggaaagactaagagaaactagaccaaacaccttcttgtacacacttagaggaagcatgggtttctgggtaattgtttcttacactcttacaatgccctctggcaaacagatggcttctctttccaccagctcaaagaagctgtgcgcgtgcagggacctggcacgtcgtttctttgagactgttcctctgcacagaccccggagcagagctttatgatggcactacttgaaaggttcagggatggcaggctttccttcatggggtcagcccagagatgctggcatccagtcccacagagctcagttctccttgtatgattccttgatttgcaacgcctgtctcatccatcccccacaatcaccagagctcaggcttcagtaggactgttcatcttagccactgacctcattagcaggtgaacacgggtacacacacacacactcctcacacatgcgcgcgcacacacacacacacacacacacacacacacacacacacacacacacctttccatgttctcttgctcccagtctcgcacacactcgctgtcagcccacctcacagtccttgtcatctcattagtagttgtgagcatgccctctactgcttcgtttggaacctgcttgtaggtgaatagtgccgcaacagcctttggagctcacacagcacgtcatcagctggatgcgagaattgtttggatttgtttttctaaagctatgctgggtgctacctcaaacactaaaaatggtcattgtttgtttgtttgtttgtttgtttgttgaggcaaggcttctgtgtagcccaaactgtcctggaactcactctgtagaccagactggccttgacctcagagatctacctgcctttgccttccgagtgctgagattaaaagggtgtgccaccacgtccagcttctaataatgtatttttaaaggtagtgtttagattaagaattctctaggggggctggtgaggtagttcagtggataaaggccctaactacacaagcctgctaacccaagtttgtttcctggaccactaaccagtccatcctcccttaaaggtggaagagaatgaattgaattcacaaagttagcctctgacctctacacataggccatgtatgcatgcatgtgtgtgtgcacacacaataataataaaataaaccacccccagaaatccaaatgcttagaagactgaggcaggaggaccatgagtttaggattaacctgagtctggcttatctcaaaaaaacaaagaaaggacaacaataaaaataaacagactctactgtttagtatctgcctaagtttcttaatgtctcagttttaatttcttaaaaaatgtagattataataggtgtcctgtataggttgaggctttacaggacgtagtactctgcctaccacaccatagccaaccatgataatatgggcaggaatgtctctgcaggaatcactctactgacatttcatttccgtctctctggttttgaccccatacagcagcacacctaaatctttagtaaaataatggttttctggcaactccagcttgaagggtgggaatgactgttctgttgtgacttcttaggtatttccatggtagtcagcctccaagtgaacaggcagaagccattgttctccaggtctgttgcttttggtttgggaacaatattgagcacgcacttggccttgatgacctcctgtctgggcccctaggtactgaggctctaggaatacacctccacagctagcctctgaggacggtgctacagctgtcagcaaggtttatcagtcactgatgcgcctgccatttgggaggacctggctcatgtttggacattgatgctgttctgaaaggtgcaattgctgtcttggaagcttcccattcttcaaacatgagtctgtgagtctgtgagtgacagcaggagactaccatgtgacgcatttctagtgaaaatgagattactacatcatacacagaccattcctttatcactgtcacagagttttgagaattgggggtaggtgaccaaggagttccttatgtccccttgttatgcagaagagtgatctgtaaaataagtagctgtgaccctctgggaagggtcagtgaggagccactttgctggggcgtcctgaagagccgacaggttccctctgctctgcttccttctccgtctgctcacttgagtatcctgtggttgtaggtttgaagacggtcattgccttcattttcacatcctttccatattttgtgtagaataacgtgtccagagctcgcctgaattcaattttatgagctatatgatactgagaaaacgtggcttgatgctgagttcggccatgtttcaccctctgcagcagatgaaatgtgttagcttctgaccgtcggccagtttctgctccatgtgacagctaggatcagtgcttgcccttgtgccaccgacacaaaacagagtccctaatctggggaagctatgaaaactctttggctccttgaacaatcaaagattaatacaagtttgtgtacataatttcataattccttgcgattttttttttttttttgtagtgagactttcagggtctcttaggataaaatctgttaaggatgactgagaagaagtttcagaagcctggagttgagatttgcactgggacttatgacaggttattttgtttgtttgttgttgtttaaagaaattgcctaggagaagaactctttgttttaaagcaagcctgttacagacattttttggccttggccccctaatgtcttacatgaaattttgtgcagaaagaccaaaggaaaagagtggactgccatttagaggcttgaacaacaatgttacaacttcaaaagcttaaccggcctctgtgtactcaactttgtgaattaagaacaacttttttctttcttcttctcttttcttttcttttcttttcttttcttttcttttcttttcttttcttttcttttcttttcttttcttttcttttcttttcttttcctttcctttccttttccttttctttccttccttccttccttccttccttccttccttccttccttccttctttctgtctttctgtctttttgtctttctttctgtgatgacagacatgtatgtcatagatgcttcactgctgtgtctacccttgctactgtagacataattttagaatggagatgccatggtctttgagataggaactgtacttgaatatacctttactcacaaagtaaaaacaaatcaatgtttttatttagcatctgttttggattttacattaaaaattaagagtaattcttttaaatgactctgagtgtatatttcatgataatgatgctactataagtggtgtagaaattgcagagttgaatttgttctggaaaaaaatagatgactagaatgtatatccgcctgatgatgcattataggacagtcaatagcatatccttatggtagctgaatgttttaacatttcaaagtcttgtttgttcatttataaatgtgcatctttatagtacctgatctaggattgttatgaagactaagtgaaataaaaagcatcttcacgatacagtcttacttggttaagatgaatattcaataaatattcatacattcagttcccattagatataatgatcatttttggtattggatattccatattgcagtaaaaaggacacatgccttgcattgtcgcagagattgtgtcagcaagcacaaatacgaacaagagaagtccttaaataattcatgtaaagaaaagtcacgtgacacagtgaagcgtaaccgagcctgttttcatgtcagaggtcagagatgagtttctgaggaagtgacagttaaactcttttttttttttttttttttccattttttattaggtatttagctcatttacatttccaatgctataccaaaagtccccctttacccacccacccccagacagttaaactcttacccgcatgacaggcagccctccatgagaaggcctgtggagtttccatttcaactagaggactaagcatggaggccagacagctaagagaacttcactgtgggaaatcagacaggaactttttaggcccaggacttaacattttcattttgagggtcatgagaagaaactgtagagttattaaagtggtgatgttagccttagccttagaaaaatgccagtggagactaagacagacagaggcaggaagcccgcttgggaaccttttctggctgtctcagccagcagcgacggcttgggatggaccctttggctctgtaggattgtggttaacggcaccaggtcaggggttaggggtaaattcttggggtaaactgcttacattgctgtgtttggatccctagcacccatgcaaaagtagacatggtggtacacacccgaaatcccaacactgagggtcaggatgcgaagatctcgggttcaccagccagctcatatagtggagcttcaggcttatgtgagtcactgtctcaaaaagtatatagtggaaacaattaaggaagccatcgtagcgttacctctgacctccatccttgttcacatagacaaatgaccctgacacacatgcacacacccatccttgttcacatagacaaatggtcctgacacacacgcacacacccaggtagacatccagactattggtttggatctgactgtggcctctgggctgaacctgggccatttctaaagtgggaaggatgttcacaaactgctcttaggtttgtggtggggctgaggtagcagttgtaaagcgctgtgaatacgtgcgcaacgcggcctcatcactgtctgccgccttccctatgactgttgctccagcatggtcatcagagctcccagtttacacatgagagcttttgtaaagtgggtggctttgaaatcagaatataggcttctgttttggaactctctctccaggataacctggagtgtgagttgaaggcagaagagaaacagaactaaaacagggagccgagactctacctactgctcttacatctagccctatcagctctaccagccccccagaccccccactagactgaggacagctgtttgtctgttgcagagtgtgagcacttgatccgccacatgctggtgttagatccaaataagcgcctctcaatggaacagatctgcaggcacaagtggatgaagctcggagatgcagaccccaactttgacagggtaagccggacnnnnnnnnnnnnnnnnnnnnaagggtcagtgaggagccactttgctggggcgtcttgaagagccgacaggttccctctgctctgcttccttctccgtctgctcacttgagtatcctgtggttgtaggtttgaagacggtcattgccttcattttcacatcctttccatattttgtgtagaataacgtgtccagagctcgcctgaattcaattttatgagctatatgatactgagaaaacgtggcttgatgctgagttcggccatgtttcaccctctgcagcagatgaaatgtgttagcttctgaccgtcggccagtttctgctccatgtgacagctaggatcagtgcttgcccttgtgccaccgacacaaaacagagtccctaatctggggaagctatgaaaactctttggctccttgaacaatcaaagattaatacaagtttgtgtacataatttcataattccttgtggtttttttgttttttgttttttgttttttttttttgtagtgagactttcagggtctcttaggataaaatctgttaaggatgactgagaagaagtttcagaagcctggagttgagatttgcactgggacttatgacaggttattttgtttgtttgttgttgtttaaagaaattgcctaggagaagaactctttgttttaaagcaagcctgttacagacattttttggccttggccccctaatgtcttacatgaaattttgtgcagaaagaccaaaggaaaagagtggactgccatctagaggcttgaacaacaatgttacaacttcaaaagcttaaccggcctctgtgtactcaactttgtgaattaagaacaacttttttctttcttcttctcttttcttttcttttcttttcttttcttttcttttcttttcttttcttttcttttcttttcttttcttttcttttcttttcttttcctttcctttccttttccttttctttccttccttccttccttccttccttccttccttccttccttccttctttctgtctttctgtctttttgtctttctttctgtgatgacagacatgtatgtcatagatgcttcactgctgtgtctacccttgctactgtagacataattttagaatggagatgccatggtctttgagataggaactgtacttgaatatacctttactcacaaagtaaaaacaaatcaatgtttttatttagcatctgttttggattttacattaaaaattaagagtaattcttttaaatgactctgagtgtatatttcatgataatgatgctactataagtggtgtagaaattgcagagttgaatttgttctggaaaaaaatagatgactagaatgtatatccgcctgatgatgcattataggacagtcaatagcatatccttatggtagctgaatgttttaacatttcaaagtcttgtttgttcatttataaatgtgcatctttatagtacctgatctaggattgttatgaagactaagtgaaataaaaagcatcttcacgatacagtcttacttggttaagatgaatattcaataaatattcatacattcagttcccattagatataatgatcatttttggtattggatattccatattgcagtaaaaaggacacatgccttgcattgtcgcagagattgtgtcagcaagcacaaatacgaacaagagaagtccttaaataattcatgtaaagaaaagtcatgtgacacagtgaagcgtaaccgagcctgttttcatgtcagaggtcagagatgagtttctgaggaagtgacagttaaactcttacctgcatgacaggcagccctccatgagaaggcctgtggagtttccatttcaactagaggactaagcatggaggccagacagctaagagaacttcactgtgggaaatcggacaggaactttttaggcccaggacttaacattttcattttgagggtcatgagaagaaactgtagagttattaaagtggtgatgttagccttagccttagaaaaatgccagtggagactaagacagacagaggcaggaagcccgcttgggaaccttttctggctgtctcagccagcagcgacggcttgggatggaccctttggctctgtaggattgtggttaacggcaccaggtcaggggttaggggtaaattcttggggtaaactgcttacattgctgtgtttggatccctagcacccatgcaaaagtagacatggtggtacacacccgaaatcccaacactgagggtcaggatgcgaagatctcgggttcaccagccagctcatatagcggagctggtgagcttcaggcttatgtgagtcactgtctcaaaaagtatatagtggaaacaattgaggaagccatcgtagcgttacctctgacctccatccttgttcacatagacaaatggccctgacacacatgcacacacccatccttgttcacatagacaaatggtcctgacacacacgcacacacccaggtagacatccagactattggtttggatctgactgtggcctctggggtgaacctgggccatttctaaagtgggaaggatgttcacaaactgctcttaggtttgtggtggggctgaggtagcagttgtaaagcgctgtgaatacgtgcgcaacgcggcctcatcactgtctgccgccttccctatgactgttgctccagcatggtcatcagagctcccagtttacacatgagagcttttgtaaagtgggtggctttgaaatcagaatataggcttctgttttggaactctctctccaggataacctggagtgtgagttgaaggcagaagagaaacagaactaaaacagggagccgagactctacctactgctcttacatctagccctatcagctctaccagccccccagaccccccactagactgaggacagctgtttgtctgttgcagagtgtgagcacttgatccgccacatgctggtgttagatccaaataagcgcctctcaatggaacagatctgcaggcacaagtggatgaagctcggagatgcagaccccaactttgacagggtaagccggacccttgcctcagggaactcctgattaactccttctcttcttcagtggttgtgatctgcctaggacctaaagagatgagcagtaggaaccagctgctggctaagaccagtggcaggtgaattcacagggagccgcgggatccagcaaggctgtggagacagtgatactgggcattaccacagaaatcatagtttgcttttgacttctgagacagcatactcccagttctgcaggtcactgccaccagagtgcctttcttgtcttgagtgcgctcccttcaacagcttctgtcacatactgctgcaccccattatgatcactctcgtaccccaggagctcaggaagcagccctgagggttttgtcagcccatagctgattgccagaactgtcttgcttagacttcgtatgacacccacagaatctgcagcagtggggcatagaacagctttgtcaatgtgtatcccatgccgtgttgatgtagttaactggggtctgacggcttgcctctataactgtattatattacagttaatagcggagtgccagcaactgaaggaggaaaggcagtcggaccccctcaacgatgatgtcctcttggctatggaagacatggggctggacaaggagcgcacacttcaggtacctaagaaggagtgcagagcagtgagataagcggcccttcctcttgcctgcctttcctgcagtgtccccttcctgagctcgtgggtgttcctgctttcctccctttccctcttcctttgcccttcctggacctgagagggaaggaaggagctgctttgtgctgtgccggttgtgtctggtgtgtcagtgaggcgccacctccgagtctcactctccctttctctattggtagtcattaaggtcagatgcctatgaccactatagtgcaatctacagcctgctgtgcgatcgacacaagaaacataaaactctgcgtcccggagcacttcccagcatgccccaagccatgactttccaggcaccagtcaatctccaggtgggcaatgtctctgagacctaggtgagaagaggttataccagggcaagggctagctactgctcatcagcttttggtcaggagagattcatattcatccatctatctgtatctcctcccttgtcagaagaccatcaaagtctgggtctttctttgagagaaagtcgcatggcagaaacagttgtcttcttcgttttgtttaaagaagtagcaaatcattgtgagataccattctccctaaagaatgcttccttgctgtgttgcctgagagcagaagaaccaggctttggcaatcaagactgctttgaatataatcctagccattgggaatctgaggcagaggaatgagttcaaggctagcctgggttacatagcaagagcatgtcttagaggaagaggtgagggaagaaactactttgaaaagctgtcattatttcttctagtgtctcaggtctctgtgtgtctgtatgtgctgctttctaggcggagcagacaggcactgctatgaaccttagcgtccctcaagttcagctgatcaacccagagaaccaaattatagaggcaagtagccacatctgatcactgtcaactgaaaccacgtctcttcccatagctacaattcctttccttccttctgagttacttctgatcaactgtgtttccctccaccttagcctgacggggctgtgaacttggacagtgatgagggtgaagagccttctccagaagccttggttcgctatttgtcaatgaggaggcacacggtgggagtggctgacccacggtaagtacctggtcagcatcctgctcagccctaagtcaaaaggttccgccagggtgagtgcctcttgtggcacgttttctgagaggccacactaggccatggccaatctgactagttattctccctatatgcagtgcctcttagcagccatgtgaggagagtgtaataacatctttgttgatagatggagttcttctagtctaagtcatcagaaatattctgtagtattcagtcacctttagaaaagtgtagtagtgcaagcctttcatcccagcacttaggaggcagaggcaggaggagctcttgagttcaaggccagcatgatctgtatattgagttcaaggacatatagagaaactctgtctcaaaaaataagtaaataaatctgccaactttagcagcttttagagatgctatctacctcgtgttctatattggaactcttctagaaagaggagacaaggtggtgtggcatcatttatatatgtggacagttagaggcacttgcctgacacaagcaagaatcaggattcagtatcctgctttgtctcaaaatgaacaggaatcccaaaacatatttcccaaagtgttccttgaggtcctcgtgttggggaagtggattcaggaccagctcactccatttctactctgcagtcgagacctgtcagcatgagcgacagcccatcttgttggtgaatgttttcctcactgagcaggaaagagagggttatatatagctagccttgtcctgagagttcagctcagggcggagctggctttcttatgtctgtcttctgagtggatccccagaagaaacgcccatgcctgctcgtttgcttgttttccgtgcttgttctcgatgtgatgaaacaagcaagtgagagaacatttgggttccacacagaatgtgtcactgccaacgaggggtggagtcctgagtcgtgattagtggaaaaatctcttatttaaagtctgctgggcatgacagtcccgaacatccagttcttatctgtcctgtcagcatggacggtagtaaccgaattctttccctggtgaatcagttgctacttcaggcagtcattgtcttagcggatgccctgtgctctctagaaacttgctgttcccctccaagctttgagagcctgggctagagttgtgccagcctgtgtgtctcctattggctttcgaaagggatcaatgaagtagactccccaataactcagagtgaaattccacataggagacagactccactttgctttagtgtcttagacagaaatagaaatttaggaggagtaacgtccggaaggtggtgcttctgccggcatagagacctcagttcagatcctcagtgttcatagagagccagctgtggcagcctctgttgtaactacagctctgtagagtggagacaggcagatgcaccaagctcacagacagcctgacaacaagcgagaccgtgagagacccgggagagcatgggagaggaaggcttcctacctctggcctccatactcatgcatagacatatgttggggcactcacatgcatttactatcgtacacacatagactacatctgcacacacatgtatacacatatgaaaaaaatagaaaaagtcagacagtggcacacacctttaattccagtactcaatagacagaggcaggtgggtctctgagttggaagccagtctggtctatagagcaagtaacatgacagccaaggaaggatacaaagggaaaccctaacccaaaagaccctcctacccacctccaaaaaagatttgtgtgtctgtatgtgtgtgtgtgtgtataaaatttttttactgtactagttggtagcggtagtattgactactgtactagttgtggtggtagtattgactactgttctagttgtggtggtagtattgactactgttctagttgtggtggtagtattgactactgtactagttgtggtagtattgactactgtactagttgtggtagcattgactcagacttaagcattctgagtaaccacacttctctcttcctgtttcccgttagcacggaagttatggaagatctgcagaagctgctgcctggctttcctggagtaaacccacagggtccattcctacaagtggcccctaacatgaacttcacgcacaacctgttgcccatgcagagtctgcagccaactgggcagcttgagtacaaggtaggaggccatggaaaggacctgcccacaagaaacaaacttgatcttcccttggtaggctctgacagttctgttccagtactggagagtttcctgagggaggggagttcccttctgtaaactgctgtggtgatgggcgatatctccagcccccctcaccccagcagatcctctcactgtagtagatgagggtgggctgtttactccgtgttttcccatctcaccactgtatctgcctactctcctggcaggaacagtctctgttacagccgcctacactacagctactgaacggaatggggccccttggccggagagcctcagatggaggcgccaacatccaactgcatgcccagcagctgctcaagcgcccacggggaccgtccccacttgtcaccatgacaccagtgagtagcagcccagcctggctttctcaaaggtttttgataagaagtctgtaataaaggggctggacttggctgaaatacccacagtcctctctaatacagcatcctgtgttttctctgacctgcctcctcttccacagagacacctcggaggactttccccagcagatgcagttcacacgggcagtgctctctagaatgaactgctttttaattttcatcttataaagacaagctggcagggggtgcacacgtgcttcagtgcattcgtggggcttaaaggacagctttagggggtcagttctccccttcccccttcatgtgggtagttcctcaggcttgcaaagcaagctcttaccgctgagcacctcaccagctctcctgtcgtcagcaccacctgacatttctggctcagcctcgggtgatcgtgtgattacattgtggctctaacttcagtcggtgtctcagtcacaccattttgtataatggtgatatgcaaaggtttaatctcacagattggtttctgtttatttctggtgtgtttctgtcatggtcctgtcagactgaatagtatctccacagcccttctgagctatttgggggagtattgcttgaaatcacattacttggtgacttctgttcaccgatccatcgtggatcaatacgttttaaaacactcggttaacagaagctcactctggctctctctgctttacttctcctgggtttggtcacagagcggtgtgtgagcccatgagtcacgttgtcagttgcactgcagttcagaaaacagttgcaccagatctggtggtgtgctggttatgatatcaaagccgagttcccctgtatggagaaaagcttatggagccgtgtagtcccagcccctacaagtcaggccaggagggtcagtgcagccttgcagctaacctggtctacattgtaagtcccagtctaaccacagctacaaggcaagacacagccttaaaaaaccagcatgccagattgaatgccaaagtgaatgacatggctgatgggtggcagaggctcttcatgggcaaggttggcattggttggcaaggatcagcatcagcattgtggatagtggggtgacttcctctgtccactggactcgttgctgccaaggtcactaacaagctcttgttgataaatccagtaggcatttttaatctttatctttttggatggctcaactctattagtcattgttgaccttcccctcctgccccccttctccgtagtactttgtttttgttttttgtttgtttgtttttgtttttgttttttggcttctgtagttatcctaggttttccttcggccagtcagtcccctctgaggtttctgctcaggattgacttagccaccaaggcccgtccccttccttctctggatgagcctgtccacttcccgtcagctgccatctggccttgcacccaggatgctcttctgagctctacacatctgcatgtgtgatcacctctaccataggtttaatagctacctcacaagtgctcacagtgtgaatgcagcatgtggcacttgtctttctttcttttctctcccagggatagggacagcactgtttgttttggttttttatctttatacaatttttgttattccctctgtcagtcagttgtctgatgtttgtgaataaacagatttcatctctccatctctgcccccttccgtcagccgtggtcaccagtcaccttgattaacacagtgactcccagcaggtgcctggcttgactcctggttaccactggcttccccttgcaccctgcaagtaaagagaccccactttcccaaacacagatcctgtaacaccatgcttctgcttaaaatcctacagggattcaccactgcccatcccaaaatcagtttgtgtgctcttcaaggccgttgataacagcgtcttcccactgcctcagccatagctacttcttgtccaactgtttactacagccttaaagctaaagtagaggatgtgaaaaatttcagaagttggaattatttcaataaggttttgtttgtttttgttttgtattagccagttttaaagataatatttatttttatttttggttaatctttttttttcttcagtttttcgagacagagtttctctgtatagctgtcctggaactcactctgtagaccaggctggtcttgaactcagaaatctgcctgcctctgcctcccgggtgctgggattaaaggcgtgcgccaccacacccggctgtttatttttatttttaattaatgagagaagtgtaccagagggcaggtgctggcagaggtcaaaggtgcggggtcctttggagtttggtttacaagttgttgtgaaccacccagcatgagcaaggggtcaaactctggacctctgcaaggtcagtgtgtgctcttagccctgagccatctctccagccctggaatccagtgctttagacctgttggccatcaagtatggtttctaaatagcacctgaggcatgggtgatgcttatctgggccactgggccaagaatattttctgagggtgcacaacatttctatcttcacccagggaagagccaggaacctcagtgtggtacttctcattgcgtttatgtctcagagtatagtgagtatttaaaaacatggaattacaactatttgattatatgttatgcaccaatcaccatgatgctttcccggagttcagacatccatccagactctggagctgacattaatgtgaggccacggtcagttcctaggcactctaggtaggcagttcgatgcattccaggtccttggacactgtaggccttccctcttctctcagcacatgaccctttgctctctgctggatgttcactcctgtgcacacctcgggtcacaggccagctgctgcttcctccaaagtgccttctttccttcccaagctcccatggaggacctgagagctcagtcgtgcacttacgattgtctgctcgtttttctctaaacaaaggcaaagaccacagctatgaatgcgcagctggtcctaaaggaggcctcgagtattagatgaacaagcacatgcctgtgaacaagggaagaaatccagatatagcacctgagcccgatggagctggaaagcaagatggaagaaagtcctctctagccaccgttctagggaagcctttgaaataagaacattaacaagacccttggcctcagtccagttaccagagttgagggcatcacagaataagctgtcaccctgagcctttccttcctgtctctctgcaggcagtgccagcagttacccctgtggatgaggagagctcggatggggagccagatcaggaagctgtgcagaggtaatgtggcacctggcagtgcttgcagaacgtccttgggcaggctcccctgcaaccagcgaaaggtcacctctgcccagggaggtggtgcagtgcagcttcaacacttgtgtggtctctttgctcaagccagatggcatgttcctccccacacggaagtaacagaagactgcccagaaaatttcatttctataagcgccattggaagccccttaagtgacagcaatacccttaagaacgctttctctcctccctccctcttccttgtccccgcgttcatattgcaactttggtagtgttcaggcctaacgcctgctcctccctgccacgaactgtttactgaaaaggagttggagattggagatgacagtgatcctagctagtctggccatggacctctggcatggactcatccgtcccaggagaatgaatgaatgaatatctcctgcactgtttgctgtgtgtttcctccactcccttgtaccaacactgagatattgggaagaaaaaacaaacatgggggttggggggaggggcagggacagttgtaaatatccattgtttgcagaaccttgttgagagatgcctgattcacagagcgacagtgaccatcaggtgtgctgtgcagtccgatggcctcagttccagtagccatggtctgcagctccatgcatgcccccttgtggagttgtctttcttattttctgtgaaggggttttcaccagaatccagcatgtattttcccagaaatacaggtgttcttcaagattatatgttttcccttgagggaagttgaaataaaatggttttcatgggctctcggggaaactgtgggtgtttttatcaatggacattaaccaccgatggcttctttaagcaagtttgcatactacgaattacagtctgatgacagcttttaactgacgtaggcaatgtagtcaggaatgaactaagagccttatggttgttgttcaggaattgttcttcacccagaaggtctataggaaagaccaaagaaggtgcccttgtgcagaaagaaagccctagtgatcaggggtaatgctggcctagtcaacataaggaaaacaaaaaacacaaaaacaaaaacctggtgactttgcctcagtctgatactcttgcttctatggtttgctgataaaaatgaatttgcaaatgcgtcctactggtgtcttgaagaaacgagaaagtagggaatgttctggatccccctccaccccttggaaaggtgcagctgggttttaccttcttgccttagagttcacgtcctctgcccccaccttcttcagaccaacattggaaggccagtgagcctgtcagttggaagggacagaaaggagtcctgcttctcttatctgtattcaagacaagtgaagtgctgcagggggcctggagcaaacgcaggcccccgggtcttgttatggtgctgacctgtgtaggttcgcaagctccgtagagtgaatggcttcatggagaccttggcctcctcttctgtttcctttcctttcttctttacctcctgaaaatagatctgaacatcctgtgtggttttatttcttcatcctctaagtctgggagccacatcagtttttcttctccagtgattgagttttggtcacaggacataagggaagaactcagttgtcctcaaacaagagtctgttnnnnnnnnnnnnnnnnnnnnnnnnnnnnnnnnnnnnnnnnnnnnnnnnnnnnnnnnnnnnnnnnnnnnnnnnnnnnnnnnnnnnnnnnnnnnnnnnnnnnnnnnnnnnnnnnnnnnnnnnnnnnnnnnnnnnnnnnnnnnnnnnnnnnnnnnntgtaggagagataacttcttctattgaatggaataaaggaaattggttccaccgcctttgcaagctagatctccctttcttctcttaatggcgactcgcaagctcgaaagcagccacctcagtggtgagccaactgttggccggttaggcaagcttcacctccaccctgttgggggttgcttactgtggagcccttttggcaccccatactgtcctacccagtgcttcagactaacttctgttgcttcttgcgcgggaacattcttgtctttttttactatgaaatgtcctccctgcttgttgcaggtacttggcaaataggtccaaaaggcacacactggccatgaccagcccgacagctgagatcccaccggacctgcaacggcagctaggacaacagtctttccgttcccgggtctggcctcctcacctggtacctgaccagcatcggtgagtagccgcttggcagtgtgagcatcccggaggctcattggatcagcacccttctgactagcctccagcttagagtgactagctctgcctagcagccacctgccatcccgagctcacacctccgctcctagccctaaccaatgcacagggcaaaagctttctcttggattctggagcagccaaggctcttccatctcatttcttagaccacctactcatcacctgcatctgctgcatgtaggcctttgagagagtggtactctcagaaggcagctctagaagtaaggactttgtagcaacatccccaaacatgaccgccaatagttcatcgccttcagaaaatgggcacttgatgtggcattagagcagcaggctggctgtagacagaggcatacccttgttgtgtggtagaacaggagtgttgcatccttttgagtgctgtgtttgggaagtaattctttgagtattctgacagcaagatcttttgctaggcctctgttatttagaattcattaccttgaagagagaaaccaagtttccctctaactctaactagataaatttgctgattccaaggtagcctgccagcaagagagctgattgtcctccatgactccttgatgactggcagtcttagccatgtccattctgatgctgtcccctagctcccaggtcatgtttcccaagtcgtcagccattgcttgatcttgtttcttccagtcttcttggggtagggtgggatagtggaatgcagcctcctccagaaggcgaaagcagatgggttctgaggaaattcagtacacatgtgtgccaatcggagggaacacttgcaactagccactcagatcagctccatacagggttctcattgtgcttcttgtgagcagcaggtaatcagctgaggcaggtgaactctgagcagacagggacataattagtgccacgctggaactctggaagaaggaagataagctttcataattgaccgtgaacaatttagaaagaaaaagtcctattaggaactaaaagaaacggtgaaggttctcatgcaagattgcgatggtgcagcccccgtgacggaaacccctgggttgctgcagtcagtcacctcagagagcgcctctgtgctggctggctggcgagctgcccccaccccaaggcagctcgcatcgtgcactggtcctgaaggtgctttcgttgcttctcacctcttcctcgtctgatatttgacttgtcagccctcccccagggccttttgtttaccttttgtccattgaatacctggctgtacttctccgtgctccttgggaaaatggtgatgagcactgtccagccagccttcctcacagacgctctattctaccaacatttgttaaaagaagaccacagcagcctgcggacagggtccatccgtgggacatgcattgcgcctgcagatattgccagggccttgctgcctagagccctgctgcctgttcccatctgcacatgtgttacctgggtttctagggccaaggcagtttgagttggaaacaaatgaatgcttgagtgagaaatcatgtactgtggggcggtggggtcactatacaacgcacaagagattaatgctaattcagaagaaaagagaagtgttctaaggccgtaaaacacacgatgtgacgcaggcagcttgtctgcgtcaccggattcctttcgttttctggagcatgattaaaagaacagaatatatatctattctttgtgttataataggtgaagtccaccatggagaccgaagaggggctggtcaacatttacacccctggaagtgtatgctttaaaagttggcacaaaacaggttctatccagttgggggctacatcactgttggaagagtataggggagatagcagcctatgcaaggctgccctgggtgaccgtggttgctgttgaaaacaaagttgtacacgcttgacactgcccatggctctgcagtggtcaggtccctcggaaccaatcccctgaagtgactgagccaggctgagctggggccgacttcacagcctgagagtccggaaaacggtgccacaccttgaacctgggatattcttgctataatgagaaagaaatggtttcatgcagaaagacagctcgaagaacatccctgggtgacggaaacctgtctattgcctgaaaatactgaaagtgtaggcgtccgatgtgaggggagataataccggtgctgggtttccattcagaggctgaagtgcagagagaacaggtgtctgcaagcatccttggtgaactcagtgtctggaccgtgacatcctttccccagccctgattaatctgccttgtatgttactaaaacaagtaggactccatgggcatttcactagctcaccactgcttgaagctttgatgacgtctgagtaagggctttcacccccgacatcagcactctcttggcctcgctgcctggtcctcatttctcctcagcccttccctgtctgcactgtatttgaacttgcttgttcgcctgcttccttagttttggctctgcttcagtccaaactggcaaggttccccaccccctcaccattggctcagcgtgatgtcatctctgccttagacctgctaccctgaccctttccatcagctgtggggacgctcgctgcctctgcagtctttaacctgcttatctcagctcataaacatctctttctggctaggcagcaagtgtaggtgttagccagcccggtgctatcttagggctcctgatcaacggttcttctttctccccataagacatggctgtgttctgactgaacactggggacccctctgtcagcaggaagttgggcaggtgctgctgtgtgaggagatagcattcacagtaggaaggaggcctcatgtgtgttcataaggtacgtgcaggatcttgaggcccacccacattcctgaggaatacgctgtctccgtgctgggatcagaggtccctgtcttcccccaccccagcctccaccctcccttctctagaacagaactgtgagttccaggccagacctttgaccacagaactgactttggtttcatcctagccacacatagattactgctagaggtaactcagggtcaaacggtgaattctaagtttctaaagataccaggcagggatctggttttaaaaaccatagcttgcacaacattatccacacaccgccccccaaatgcaactacaatagaaaataaatgagtgactataagaaccaagcctgtgtggttcagccagtcctggccgtactgcggagttgcaccctgctctagtatgtttatataagaaccggatgtagttgaccccaggacctcagcaggcctgggaagtaggaccaacctgaggtaagtggaggtgggagatgagggcctgtagtccactcagggggacagccacctcaggaagtgacacggagtaccatgtgcagggctcctcatgcatccactgtctctgtattcatgtagacccatggtcccgtgtgattggtcataaccccccgagtcctggctgctaaccgtctcttcccatatattcagctccacctacaaggactccaacaccctgcatctccctacggagcgtttctcccccgtgcgccggttctcagacggggctgcaagcatccaggccttcaaagctcacctggaaaaaatgggcaacagcagcagcatcaagcagttgcagcaggtaatctctggaggggcagggggagcagtacagtgccaggacccgggcagtaactctccatacccttcatgtcaaccacactgaggtgttctagcttaaagcagaatagctttcttcaatatctactgccctccctagggtcaaacctgcttccctcataatgagactaaaaattttttcccaccatctggaattcattgggaaggcatttctggtttgatttttttcttgggaacggtacttgtaagcaatcttggcaggccccttgtatgcagggcacggggtcgtagtggaccccattgctgtactttctcacccccggcataatccccagctggtattgctcccagaggtagcaaacctgctcccaggatactgtgacgagccaagggcttcaagtagcacgtgctctctctgggtttatagttgattccacactgggcattccacagtgtgtccttggcgtttcccactgctccccagagagcagggcgtgaggatcactgtgtgcatgcccaacaaggataccgttcttccatggctcattccgcccatgagaccttgggggcagatctgcctctcctgaggtcatggcatggggtagacttggccgtgtcccgtttgtccccactgctttcccttcaggagtgtgagcagctgcagaagatgtacggggggcaggtggatgagaggaccctggagaagacccagcagcagcatatgttgtaccagcaggagcagcaccatcagatcctccagcagcaaatccaagtaggccctcactccctcttcgctctctcagaatgcgtttttgagtttgctggcaggcacattggcctgtgcattgtctgaaagactcagggcagcgtggagtgtgagccacgtttgtgggtgacatgtctgagtcacagcgctttctgccccttcccaggaatagccctaatgcctttcgtagctcacgatgctgccgttccccccttttgtgttttaggattctatttgtcctcctcagccctccccacctcttcaggttgcctgtgaaaaccaaccagccctcctcacccaccagctccagaggtaatgaactacttagcctcttcctgcattgttggctggctggacggtgtggctcccttgtctgacgcatggggacgcttgactgacttgagcatttgggatagtcttctagaagaacagggaagccgagttagagtttgaagggcttactagaatgctgactatttcctgagctccatgaacacagtggcctgacatccatcgaaggccaggccagtgagtgctgagttggtggcagggaaggactggtagactgaggtgtgggcaagctgtggtggcctgctaccgcagttgtccgccccaaactacaaactgtctgtctgcatggattgtctggctgaatgttaactgcagatggttctgtcagctcaggaggcttatgtacctgttctgtccttttctaaggttaaggattcaaccttcaagcccaccccccaaccatcccagcaaccatctcttcagacagccaagtaacagtcctcccccggtcagcagtgccatgatcacgtctcacggtgagtagaggccgagggagtggatacatattgtgccgtgcagggaaagcctggcttttaggcttggatttgttgctggtggtggtggtggtggtggtggtggtggtggtggtggtggtggtggtgtggtggtggtgtgtgttgggggtgttaaactttgtttcttgactgtgaaaccttgggtaataagtacttggctttctcaacaataactgtaataatagcaacacttaagaaatatatataaatcacctgggacagtacccaatataatagtccttaatacaggttagccactattgatgtagctattaaaacctctccagtcctcgtactaggtgtgaagactatgggtgcagatcctcagacccagcacacagtcaggtccttgccagtctccttggcattgtggagaaacatagaattgctcttcctcctccaggtgaccttgagtcagagttggctcttgggttctgtcccagaaccaccgcacgagaatgtgcagcttaaccaactctcaggatcattcctgcatatccttggttaagaaacactgcatacaaactccgctaccctaaatccagccatagagcagctcttgggggacttaattggaaataaaattgcaggggagcccacctgaccgactgagtcctagttctgtgggtaggacccagtgagttagatctgtttctgccagtttctggtcttgtcttgtatagtgaggttgaagaaggctgttctagatgctacctgctgtggggtctcctctagctggcaggtaacctgggcacttggtcaccctgtggtccctttctctgcaggtgctacgtctccctcccagtttcaaggcttaccctcccatggtgcaatcttccagcagcaacccgagaactgttccccgcctcccagtgtagcactaacctgcctgggcctacagcaggctagccagtcacagccagtgactatccagctacaggagccagttgacatgctcagcaacatggccggaaccgcggcaggctctgcagggcggagcatccccatcagccccagcgccagtcagattcagatacagcaccgagccagcctaatggctcccttcagctatgggcaccggcccttgtccaagcagctgagcgctgacagtgcagaggcccacaggtgagtgagaagggacaagtctgcttgtgctctcatgtcacccatggtcaaagcggcatggtgggcttgttgatgagacaggttgttagtgagagaagaggaaatggcagagggccttcctgatggcctgaaggaaggaagatctgttagaggaacatgtctgttcccctgacttattattctagggttcttccttctctgttgtctctaagagactattattctaaacagctcagattattattatttttgttgttgttgttttgttttgtttcgttttgttttgagacagggtttctctgtgtagccctagctgtcctggaactcactctatagtagaccaggctggcctcaaactcagaaatccacctaccactgcctggctcagattattttttaagaacagctagattagactgtgtgtatagctctgggggtaggagggcaagcctgaatccctggtttcagtccctgccaccagagaagctaggtgtggtagcacatgcctagaaccccagcgttctagaggcagaggcaggagtggcaggagttagaggtcctcttcagcaacatagcgagtacggctagcctgggctgcatggagaccctattcaagaaactatccaaggtcagaatgttgctttcaggataattacatgcccagtgccttatggctcttcaaaaacttggatgagcagataaggggatgaatagtggtggtgtgcacagtcctccctgccacagcacaggtctgtaccatgagagcttcgtgctaaggaaggcgagtgactgtccccagggaagctggtgtagttactggaatgcctggtactcataccattttgtgtctgcagcttgaacatgaatcggttctcccctgccaactacgaccaggcgcatttacacccccatctgttttcggaccagtcccgaggttcccccagcagctacagcccttcaacaggagtggggtttcctccaactcaagccctgaaagttcctccgcttgaccagttccccactttccctcccagtgcccagcagcagccaccccactataccacgtcagcactacagcaggccctgctatctcctacaccgccagactatccccgacaccagcaggttccccatatccttcaaggactgctctctccccggcattcactcaccggccactcggacattcggctgcctccggcagagtttgcacagctcatcaaaaggcagcaacagcatcgacagcagcagcagcagcagcagcagcaacaagaataccatgaattgttcaggcacatgaaccaaggggatgctgttagcctagctcccagcctcgggggacagaatatgacagagcaccaggctttatcttatcaaaatgctgactcgtaccaccgccaccacaccagcccccagcatatcttacagatcagggcgcaagattgtatctcacagggtccctcgcccacccccacccatggctatgcccatcagccaccactaatgcattcggagagtatggaggaagactgcttgtgtgaggggctcaaggagggcttcccagacaagagctcaagcacactgaccaaaggttgccacaacagccctctgctcttgtgtaccagtgggcctggggaccctgagcctttgctgggaactgtgagtcaggcccgggagctggggatccatccctacggacaccagccaactgccaccacgttcagtagaaataaggtgcccagccgaggtaagagtcccctcagagaaagactcttgggagagtttgctggaatttaagtgtgcaggggtgttagcttggttctgctagtattctgtgcgcctaagcaaaacaaaacaaaacaaccctaaacagaccctaggaccatttggggggagaggtgaagcatgtggaaaggcgattggtgggtgagaagtcacctacaaaatagacagcagtcgacaggtggcacccaggacactcctggtcacaccacggggtcctagagtccagatttgcccggctgtcatcagaaagtcgcagtggaaaccgtcagcagtactaaggaaatgtgtaaactgtggggctgagagtcagagcctccagcccgtcctcctctgtcctgactgcgagatctagactctattctcatcgtcctcttgtgtgatagaagggcaatggacactggccctctgcagcatcttgtgacgatccgagcatttgtgttcgtacagactgcctctgtgtgtgtgtgtgtgtgtgtgtgtgtgtgagagagagagacagagacagagacagagacagagacagagacagagacaacttgataactaagtatgctgtatactgtactggggctgcctccattttcatctaaagattagagtttacctgagtgagttttgtttgcatagcaaaaccagagcatcagaccccctgtagccttttgcttcaccctcctcaccacaaccacagagggagtaaagcgacttacccacagagtctgggactctgggcgtttcttcctcattccccctggagttacccatatctcttgcctttaaaggcgatgcacacaactcggacccatggctggccaagccctgcccagcagcaggtgtgtgaagacttggtgctgtcagatggacttggcatgtgctcagagaggagggaaatgtgctgtataaaatgacagtttaagtcctgaccactgcagccaatggtgtcaccagcccggagatctgccctccacatgcatgttgaactctgctggttgtatttagagtggaactttataaacaggttgtgtgtagaatgagagacacctagcagcattgggggtggggatggaacaactttgaaggagcagatctgtcagatggaaggactcaacttttatgtgtatgataaggaagagactctaaagtgggtagaaatcacggtagattatagctctccagagaagactgttacgagagactgccatcacaggctacctgagcagctttttgttgggtgtgttctggaagaggcggatgcctttgatggacacactgtagaagagcatccatgtgtggaaagtttctgatgactcagctcgctgaaactgcatcgtgcatgcgtgcctccagtgtgcacacaccgagtgctgctccatcctttcttcttattgtgatgctagggcaaaacccagggcctcacacacatgctaggtgagcaagctctacacggagctgcacccagcctgttgtccgttttaccagtgacgcagctaagacttaggagatttataatttgcctctgggtcagagctgacaatgactgccaaaccctgctgccagtcgatcaccaccccaacaatccatgaatgtgtctgatgttcaggctactgaagaaatagtggagcgggtcccagaacagtgaagccatgcactggaggcagagatgcattagtgaagcccagtgcatgctgctgtctttaattcagatccccttggggccagaggtctgtgtgttaaaagtgattctttgtggaggtgccccactgtccttaggctagcacaggttgccttggagcctactaggtaagcacacttccgtttattctggcagtgaggggtgccaagctaaataaactcctactctatgcttggcgctctgactcaagacatcggttccttttcacacccaccctcggaagtgtgtgtcaaggtaccattttggtaggagctgccctggcctgacctgacatgcctgtgaagccttcagttgtccttttcctctctccccctccctctcccctctttttaaggacagggtctcactgcataacccaggctggccttaaactcatgatctccaagtcagctgtgcacgtgccggtcggggttccaggctatgcaccacaccaatgttttcagttctgggaagaaattccagaatgggctggggagagggctccgtgggtgaggctctggccacacaagcctgacagnnnnnnnnnnnnnnnnnnnnttttctatgatttttctttacttttctcctacatgcatgtctgtatggagggaggatgaagaggcctctgtcacccctgtcccctcaggagatacctctttagctgtttcctatccatagtaggctgtgcatagtcagcacgcatgctgtggcagcactagaagaggaagaggccagctctgcacggtaggggggatttctagaagctgggacacatgtgggcagaggaaagagccacgtgagttgtctcaggaccatttgtgccgaggcttgctcagcctgaagtctagcacaggacagaactagaagaaactaagggaaaggggtagttttgtttgtttttgtttttcaagacagggtttctctgtgtagcctcagcagcccttgaactcacagaaatcagtctgtctccaccttttcctctgcctctgcctctgcctcctgagtgctgggattaaaggcgagcggaaccgctgcccagctaagggaaaagtttctaagatttagagttttgcctaggtccagtttcaaactgtcgtgagaatcatggcacactgctccctccctccactctccagcaggtagaacaccttgagagtaattggcaggctgtcagctggtccccatcggatcctctcttctcaggcggaggcttcatttcaggtcaatactgagtggttacaggtccttcatcaaatctgtcctcctttttctagctaaccaacctctgttactcccctcttcttcctcctatgcactaccatcactgctgctgtccccgacccatattttgttggcctagaagcgttgacacaggcttataaccctccaggtttcaactgagagcttgcctgcctcctagccttagccccagtctttatgggtgactcttacccttggggggcctgtttgtcagtcgccttctccccgacctttgacggaggttttctagaagtttccccttccttcctgccatgcttgctgatctcctgcagagatgaatcgccctcctttctgacatctgcctttgcagtgtggctttgggaaccatgggcacaattacccttagcaaagccccatatatccagtgatgtgagtgtgggtcccagaacagtgaagccatgcactggaggcagagatgcattagtgaagcccagtgcatgctgctgcctttaattcagatccccttggggccagaggtctgtgtgttaaaagtgattctttgtggaggtgccccactgtccttaggctagcacaggtagccttggagcctactaggtaagcacacttccgtttattctggcagtgaggggtgccaagctaaataaactcctactctatgcttggcgctctgactcaagacatcggttccttttcacacccaccctcggaagtgtgtgtcaaggtaccattttggtaggagctgccctggcctgacctgacatgcctgtgaagccttcagttgtccttttcctctctccccctccctctcccctctttttaaagacagggtctcactgcataacccaggctggccttaaactcatgatctccaagtcagctgtccacgtgccgggcggggttccaggctatgcaccacaccaatgttttcagttctgggaagaaattccagaatgggctggggagagggctccgtgggtgaggctctggccacacaagcctgacagcttgtaatggtggaggaagaaaagcagctcccaattcacctgacctccaccctcacatgcatcacacacacactcgataatgagaaagaaacttcacaggtcatttgtgaagaaatggttctaacagtgtgctgcactgcaggtgaccgcagaacccgcacccatgtctccctgtttcgacagaggaccttgatggttcttggtgcccttccatcaaacaggctagtctcttggcgtttaacctatcactccatgggagggcagctgagtacaagttagtgagccagggtcatgggtgctgcgggaatgtggaaagccaaagggcctgtcttcaggaagaagagctgtatcagaagtggcgtggaatatgtgctacagttcacaagagcagaactctgcatttattggcatttctgaagggtgaatgggtaaggcttaccaatgttagtctaggaaacttagatgccccgttacccgaccgagtctgtgctttcctgttccctataaagctgtttgccgccagccagtaggaagccagactgggcagagcactgagcacctactgtgccagaaatgtcctccagacgctgcaagtgtcagagctaacctgccttctattgcctacggtctcattgtcttccacttaaggagtgaagataaggtgggttgccctcctgcagtattgcaggagcttaaggcttttgactctgcacgtaaatgaatacaactgcacagtcagttgagattaccaccttaaactcagatagaaaaccgcatcctcttctttgagcccagtcagcttccagccttgtaagggataaagtgctgacagccttgctggggttaagacagtagcccttagagcctctaagaggggtgtgcaaacatgccgtttctcatttactcttaaaacccagtaaatgaataaggatgagtcaacattgacagattgcacagttacgcaagctggcccagagtcccccagggtgtcggggtgtgccttggattctcattgtgcattttgtcccttacttgtttgggtactctcccctctgtaccctctgggttcttggaagacatagtccctgtattatttatagatccttctgtaagcctggctgttctcttactcctaaaatggcctaaagggtgccaacggttctagttccctggtcagtgggttagtctttacagccagccactggtcagcagggctcagctaaggactttgagtcccagactcagcacccttccttgtctgactcgtttacctacggagccctcagtgcttatcgcagaccttccactggtgttaggcttttggagccctggaacagccctttcctgtcagataagggacattaagggtaaggggagactgcctggccgtcaggctttgtgtactctggtgataacctggaacctgcctcctgcgaccctcattcttggcccctgtatgtattctttccccatgttatagcttcctgtcactgggacaaaatacccaagaaaatcaacttatgaggagggaaggtttgtcctggctcatggtgtcagcagtctcagctcataatttgtccttgttgctttggagcctgtggagagagacatgccatggcaaggggcatgttggacaaagctgcactttattctgactgggaaacagaaaggaagccattgaggacccagctcccaaatcccagtccagggcatatcccagtgtcctaacttattttcttctaaaatttttctcatttatatttattttgtgtagtggggataagtgggttgtgttctgttctctccttctactctgttggtcccagggatgaaactcaggcttagggtaagcacctttactcgctgagccatcctgtcactcccaaaagggagaaggagggagggagtgtgtgtgtgtgtgtgtgtgtgtgtgtgtgcgcgcgctcaggacagttgaggggagtcagttctcttctcccacctatgggccctagggattgaactcaggtcatcagacttgatggcagatgcgtttatggctgaatcatctcagcggccccaccctaacttccctttatcaagctttgcctcctaaaagttccattatatcttcttagcgccacatactgatgaccaagtctcaacatgggagcctttaggcaacagccaagatcctcacagggccctctctaacccttcccaggttcctctctagcccttcccagcacagcttctgagtgggagacacttcattttcctctactgcggggggtcttgtgatgcttaaggctcaaacacagggtcctacactctctaggcaaacattccactgcagagctgtgacctcagccctggatctggtttataatctcatttgcttctttcagaccaaaggctgctaccctggtaactaaaaattgggtaacttacttgtttattgtcctgctctgtctatcagcagcctgtggggtaggctccagaggcacaggtccagaaagatccgccacctcgctcaagttcccttccccctcctcaggaagcaatgaagctagaatcaagctgagtcttcccaccccggcggtgcctgtggcacctttgccacctccacctgacagagaagtgagccctcagctgggcactcaggagagctggtcaagtgatagcctcttgtgacctgaggcctgggaacatcactcaggaaagcagacaggagggcacagaagggaagtggagcccacaagacctttgaaaagtctgggtgggagcttagatttggagaaacctcattttcaggtctaaaaaaaaaatccaaaaggggagaaagagaatttaacagacaggaaaacacatggggggagagtgctggtctggaagagggagtggggtggaaatatcaagattctgttagtgaagagaggcgcttgccatctgctcctgattgatcacaggccttaaagtctcggcccaaggtcagaggtggcagagagtaaacccccatgacctgagtttgagccttagagagggaagagaaagccaactcctgaaagttgtccctcacctccacatacatgccataactccacatacatgccatagcgcgtgtgtacccatgtacacagctaacaattgtttaaatgttttcaatctctaaacaagggatggaaacagagcactacatatatacaacacatgcaccacatataccacatgtgtacacatgtactcatttgcatgtactgtgacatgcacacatatgcatatattttaaaagtaggagctgggcgtggtagtgcacacctttaatcccagcactcgggaggcagaggcaggtggatttctgagttcgaggccagcctggtctacaaagtgagctccaggacagccagggctatacagagaaaccctgtctcgaaaaaaccaaaaaaaaaaaaaaaaagtaggaacgggattttttttaaagtgtggcctttatagggaagtaactaggggtggttagaaaatgatctaggcaagagatactgtcccttgactggaagcaggcagtctgggggctgaggtgtccaccactgaacgagcggactctttagacttagccgctgtggggccgggaagaaggaattaagcatgactccaggaacttacacctcaaagattgggggaagggaggcggtgccaaacaagggctcttaaaggagtagcaggcttctggggaagttaatgagtttgaaatttaacgtaagtgttacatactagtaagataaccaagaaaaaaagttggatctatggatctggaaccaaaaaaaaaaaaaggatttcagtaactccgtttacatttagtgtgtgtgtgcgtgtgcgtgtgtgtgtgtgtgtgtgtgtgtgtgtgtgtgtgtgtgtacatgtgtgtgcacatatgtatgagtatgtgtgtgtgtgtgatcatttctcttactaggcgggttctgaggatacaactcaggtcatcaagcctgatgacaagtgcctctctttactgaacatctggctcattccatccactgcagtacatgagcagtgtggctgaagccatggacctagatgatgtcaaaatgggcatggggagtgaggtcaggcacagctgtgtgcaagcacttatgaaaggtgaaggagccataggcagcaccagcagtggccgtgggacagtgggagagacctgggatggcactaaggcagaggccaaggccatggatacaggccagaagcccctcatctctagagctctccatgagctcaatcaggagctgagcacaagctaagccagcagagtgatggggaaagaagaagatgggtatggcccagctcacaccccataggtggatttttccttctagggtaaggagtgtcttaaacccctatttgctgtaggatttgatgttgttaggctggccccagctcctctaacacccatgccagctgactgagcattggcatttgggcaaatgtggtccctcccctctcactcattgtgtcttacaaggggctacatgggagttggcgtcacctgtcacctggagaagctctgggcctgctcaccctgctactcttgctctgtctcctagagtctgtcctagggaactgcctggaaaagaagttctcctggacaagcaatggagctgccggatcacaacggccttgggtacccagtacggcccttagtcagtgagcacctcaggtcccggacgctccagagacaccacacgatccagaacagcgacgatgcctatgtatgttggcccctcctgctgcttagaggtgggatggtgccatctcaacctgaaagcagagtgtccccttctgccgccatctcctcagtccagccctctgcaagctgtggagaccttttttttttctttgactccccataacagaccagcattaacaggagagtcttgcggccatatgttagacttaggaatcaaatgatctgacatccagggtcttgacctctcccagaaatctaaatccaggcttcaatatatgaaccctcaatttttggtccattcctggcaactgttttgctttctttggctttcttaagagttgacctgtcagagcaagtcttgtcaactgggacacacccagccatggtagcacctgtatgccttcaggcaaccatttgtggctgttcaaatgtaaatgtgtttaagttacacaaaattagaaatttagttctgcggtagtaaataacagttacacttcacacacacagcagtcaccatgttacatgggcacttgagaacagaactgttagacctcactgtctatagatgggttggggagggacaggggtcccctgagagtgacacactgtctgtcactcattgctgctggttccactctacaggtacagctggataccttgccaggaatgagcctggtggcaggcaaggcgctgagctctgcccggatgtcagatgcagttcttagtcagtcttcactcatgggcagccaacagtttcaggatgaggaagatgaaggtaaggccttgcccatgggcaccccgggcagtcttctgtggaaattgttcactggctgaggtgctacgcacatgtgcacacgttaggggctctggcttctgtcagcacagggacatcatagtccaagttcagtgctggagcaggatgcaccttcaacaatagccctctttcagcttctccttagagggcttcatatccttgtagaacatttatttctatgtctttgtagagccagggtgggagaccatgatagagcctggagacggacaggttcaccctttctaaggtccacaggcaaagcctaggaagtcttcatcccaagtcttcacctgtgaggacatcaagagagcagtgcccatgtcctggcttgggtcctaaggatgctggcctcctgaggtttattagtgtttattagtgtgatgctcaagagaaagtggcctggcctggctcctatagcactcactacagttatcctgccccctaaccacaagaaaaggctcttgaagggtttttcatcttcacccccatatgtcagttgctcatgagggtggcgaaaggaaggggcaggtggtcaggaagggtccctaacatctgaagggcctgctgtggcctgagtcagagctggactcaggctgggttgctagacaagacctccccagcctcctctctcctgtcccacttgctcccccacctccacctcacatgttctttttggtcttgcagaatgtggggtgagcctgggccacgagcatccaggcctgggtgatggcaaccagcatctcaactcctctcgctatccagctacgtgtgttacagacatcatgctcagccacaagcacccagaggtctccttcagcatggagcaagccggcgtgtagcaagatatggaaagtgagtgccaccctgctcaggcccaggcagccctggggcccagtgccagcccctcatagcctcaatgtgttcattccttgtgtggtaccccactaaacttgagcgacactctttttgtgcaaccttccccgtctgcctgtttcttcattaagtactgtgttagttttgaggtgggctgaggactttaatttagggaagaggtacatggcccacctcatgttatagatgctatggctttaatgagatccaagctacagttgcagaggccagaggccaatgacctttggccagctctctaaagctagtctttacactccatcctgaagagtgaaacccaaccagaaaagggaaaaagagcagatccagtcaggctccttcactggtggtttttattgtttggttttggcattttggtgctaagcatagaacccagggccgtgtaagccccagccccagcctcaaccccagccccagccccagctggactttttagggggtaaacccatgctgaaaagacagaaagctcaccggccctgttggcctagcagaggtcacatggatggtgagtactagtggctctatctctacagagacagaacaacttgaggaaggtaaagccacaggcagaggcatggcagagcctcagtgtggcaagactcatacagtgacaccaagaaaagacttcactgagagcctgcatgcctgtggctcactgacagagcagggcatggacacatagggccctgagtcccagccctagtaccattagaaagggtggggagaaagggtgaagtcatgtccctctccttcaaggtgttcttgtctgcttcgtaggttcaagtacagctccaggaggaggctgagtctagaccaatagaccaacagtgtccaacagcgccgcaccgctcctccgtctgtgtctccaccacaacagtgcagctccttcccctacactaggcaccagtaggccggcgcttgggttgcgagggacatttgccatgtttgcttgtatgaccaaggcaccaaggaaataaacaggaaatcagtgtcctccatctttcatgagccagcatctggtgtgcttgagttgagttctgctgttaggaggtttgcttgtgttttgttttggaaattttcctttggagataacttattctctttgccttgcccacccctacccccttgagcatattcccccccccctctcgttttcacctaccatttctgaggtagatgaaccagaggttagtattcaggggctgaacctcaggaccctcccttccacagcctgtctcagaccagactctctccctctgccccggtctaccaggaacaaatgctagaccggagcttggtggccaagaaagggagaggagggggcagtggcccctgcctttggagattggaacagaagaaaaaactgagcctgggatctggcagaatctcctgctggcctctaactagaatcctatctggcccagcagaattccatcagatcccagcacaggccggatggcctggtgctgaaggtttgcaatccagaatggctcagtgtaggcccctctggtgtgtggtccagttctcctccagtcaccaactggttccccctcgtgagtgaacacccaggagtggtgcactgtgctgtttgtgtgatctccattcttattctctactgcgttgtaaaaagggccgttggtccatttgtgtgcacacgtatgagtgtgtacatgcccttccctgcggcctctttgtcacagacaagaattggaggctgtacggggtctcttaaccttctcctctccccagcatcctcggcccctatattttaattcttgatcatgtaggaattgtttttgataaatgttgatattattgttattattgttattattaataaagacaaaaaggattttgtttatttgtttaaaagagaaatgtttaaccagattctgtgctgttgaactgtggcttgcaacttctgtttgaagtgttttccttggctttggcatcgtgagccactctcctgtgccagcagcggatgcagtggcctcccttccccagccgaagcagcacataggcagtggctactgtccttgtcacttcctttctctctgcagtcagaaaccaaagtctggggccaaacgaggccggcccggcttctcttctggtcttcaaaaccagagagggatggtccctgctctgactcccagccctcatttctgagagccaggggccaccaacctctgagtatgcacagaagaaagccgctgcctaccatggcatctggacattaccagcagggtccctagccatcttatccttccgcaccaaccctgaaagcttgcctctttgaacaaatccattgtctcttgaatggatttgttttcaatgtgagagcttggctggggacctgtttcgtggtcccatgtcctccaatttcccctccacttcaggtgtcactaattactagccagaagatgtctgactcccaagaaagcttgacaagccattgtcagcttccaagctcagtccagctctgatgctccagccccgccctgctgctccccacgctcagcctgacctgtttacgtggtactggattgatggaagagcaggcaccaccctccagagccacccagacgaaagccagtgagcctattaaccgtgccatcttgcgaactattttcaagatcaccattgctttatattgtagtaaccaatatgcgcagtatatgttgaatgtatatgaatctactttgctatttctgttctttgaaaatgtaagaagtatttttcctttctcatttctgttgatctaaaaatgataataataataataatctccagattcaagttgctaagagcttttgtccttgtttgtgtgggacatctacaacttagtgacttggttggactgtaggaggttgtggaaataaaaacctgattatgtactaacgctgatatgttgtttgccttacggttcagagtctaattgagagaatcacatggggtaggggcagaggtgacccaggtgtctggagaagtccccagacttagggtggggcttggagcagcacattctcaccttgccttttggcctctgaacctggcaaatcagactcacactgtgtccaggcatccgtgtggactctaacccctcagaagggacacatttgtgtttgcagagttgggtgggaaaaggattccttggggtcctcagaaggagagccttgcattgaccctggctggaacctttatgaggtggcctccctcagctgtaggacagaagggcttttggtactgtttcccaatgtctgttcctggattccaggtggagggcagaatttccaacagggccccaggctctgctgaaagagctgaagtcacacgagaaaaaagatcaatgatctggggaatacggagatttgtagaaagagtgacagaggctggaaggatggctcagtggttaagagcaccaacttcctgcaactcacaccacacagaactccaattccaaggacccgacatgcttcccaggctcctgtgtacagataacatacactcatacagatagaaaactttaggcagggagaggcgcatataagaaagcctttgaggctagaattgcaatgaaactgctcagagtggaaggtgccttctcagcccctggaggtcttgaaggtgtacgcaccgcacagaggtgagctggctttggaaccagtgatgggccctaaggactcccaaaaggtcaggacacctttcactgatgctgtgtctgcaaagtttttggctagaggtcgggtaggtacccagaggcagccagattgactctgggatctgaacctggacatctctgccctccaagaaggaaagaaagacttcctgactttgtactggagccaggccccacccacttaaccacggagactttagtctcctgagcaggaggcaggaacatcattcagagctgatgacagtgtccttccaaacaggaatcactggggatccagtctgcttagggagaccctccccagccctggctctccattcctgctagcactaccccttgttgggtacatattcccagaaggggctggcaccattgaaggcctgcgcctttctgtgaccctttgccagtctgagaagctttggtgtatcagtgttattcatttagtaaatgtttggtgtctctggtgccagtcccactaaaggacagagtccttgcactgccctgtgcaggtgatctgtgctgagacagaagttgtgaaatgggctacattcgctgctgctgaagctaccagcactcccgagagtgtcgggatcccaggccagcacttgctggtccaatccaggagtcactttggaggttcccaagatgagggggtgaagggtagtgagagaaatgccaatgataggcactatcttcactccctggtcacccaacacctctaacagcagccaacctgtctcaatctgtgatgagcccatttgactcttgatctgtccagaaagacttcctgttcagaacagtaagtagctatttagactagtttaaaccaaatgtctcctgataaagtaacagtcactagcaagtaagtatggggtgtgggggagggagcatggagcatacacctataaccttagcatagaaagccaaggcaggaggattaccacaagtttgagaccagcctggactatataccaagacaggagcacacttattgctcagtcaggttgtcccagagtcgtctaccgtgatgtcatggattccagtccccaagccatgtccctggagagagtacaaaggctttggaagtgaagaaatcaccatcagagaactagaggccggacccgatccctagccccttgggcactgtctcaaagctgaggggcaagaatgttcttagcatctctgagctgccgttttttctgacaggcaaactaccaagggggtgaacatggcgtccagccttacaggggtgtctcaagtttactttaaatgagttgcggagcaaatgttaggttcaattaggattagccagcacggtttcagtaacgagccagaaagaaagataggactgtgggaagcatcctggannnnnnnnnnnnnnnnnnnnnnnnnnnnnnnnnnnnnnnnnnnnnnnnnnnnnnnnnnnnnnnnnnnnnnnnnnnnnnnnnnnnnnnnnnnnnnnnnnnnnnnnnnnnnnnnnnnnnnnnnnnnnnnncccaccccacccccaaaagacctaaaaaactactcctgtggaggccacctccctctgagtgctcccacagccctcgggggctggtttcaacctggaaaagatgtcctgcatcacagcacctgcaagccagacacctgccttaccccatttttgctgccagcaactggggtcacaggctatggcctagtaacagaatgtgttcgtggcagtgacctcaggagtctgggatgcagaacacttgccatttgctgttggtcacctttcagcagttttgcttgaaatgtgttcagacttcacagacaacacaacacaaataaaactctggagttcagaagctcaaatcatggctaaaagcatgggattgtcagagtgatattctgtctgaaaactctttcattcagagaaaacctgcattttctcttctctcttccagcacccatggatgggtagccgaaacccgcttggctcatctgcacactcagattgcttggtctctatttctgttctcaagtttctccatggttttggcccttctgcctcctctagcatattgagagacccttgtgattactgtgccctctggatatcccaggctacccttgagttcaagtcccctaatcacatttgccatgttagacaccacgcacaggttcctggacttagtaagtgcacacacatcttttccattttgcttcccatacagtgactgggatcataaggaagctgtggcatgctctgtcattatctttccttagcagataagagacccagggacggagaggttatgtaacctgtccgggtcacctggagaataagttgcagatcccagaaccaaggttctctctggttgcaaagcctcctgggatgggagcagcctggaatcccagccactccctgaactggtagacagattccaagctggtttctagggagttggggagtttcctagggagatgggcagagtacattcctgccctgggtcccaaatgcagagacctgggcgcaaggtccatccttgcctctaaggctgagagataaaggacacagcaaattccttccactctcaacaggcccttatctagaaggaagttcatggtagaacctcaaatagatggtctcaaaagttcctcttagcttgaaaactcactttccataatgggattttagagatgatctgtggttttttttgtttgtttgtttgttttgttttgttttgttttgtttttagatattctcatatagcccaggctgacttcaaacttgctatatgggcaaggctgtggttttgaactctcaaccctctgaccttccaagtgcaaaaactggccaccgtactcagcccactctacacagctacccagctctcccatcctggcaagtgagcctaggccctcaccactctgggaagacatatcgtcactgaactacatgaccccttttagtggtcatggtatatggtgaggttttctctggaagggaggctgaataacagcatctacacataacaaaaacattggcaactggggctggagagatggctcagcggtttaagaccactagctgctcttccagaggtcctgagttcaattcccagaaaccatatggtggctcacaaccatctgtaaaggaatctgattccatcttctggtgtgtctgaagacagagcgctcatgtacctaagataaggaagaaaggaagggagggaaggagggagggagacaaggaaggagctaacaactccatgttggcctctgtcatttcttctgaagcatcagaggggtcttcatcctcagcttggggatatgagcctgtctgcatctcactcaggctgacacctcagttgtttttggatttagggttgggaggctggctaaacatgtggcatctggaaagacaaatccccaaacctgggggaccagggtgaggtgaaagggggaaccccttggaaagcaaaaaaaaaaactttggggtggggctgtgagtgaaggagcccacaattcctccctccctcccttgttccaggctcagagggcactagcaacacagaggagtccaggagtgggctccatgagactatcttgaagaagacatacacctcgggatggtgcaactgccttacccctggggacccctggagtctgcagccaccccctgctgcccccacctgaacccttgatcccagctcggcagcccccgcagtttcctgtttgcccactctgtttgcccagcctcaggaacagagctgatccttgaactctaagttccacatcgccagcaaaagtaagcagtggcagggccaggctgagcttatcagtctcccagcccagcccctgcccacacacatatatagaccagggaagaagagctggacacccagactgtcggagagctccggggaggtaagtgccgctacctgccttcggtggctctggctccatagcgcctcccagttgatgctccactgtccaaatcaataccgtggatatctcgcacctttagccattctagccaatgcttccatgggcttgaattgtgtgtggagcctttccatgacaatgcctcccttcagcccagccctcctcctccttcttcttcttcaggtcacccacacccttcaggatgaaagctgtggtgctggccgtggctctggtcttcctgacaggtaggtgcctcttgacctgcgtgggactaccttcctgggcacagagaacagaattcccactgttctcttccctgactccgagtctaacctaacatgggtctcccctccatccccagggagccaggcttggcacgtatggcagcaagatgaaccccagtcccaatgggacaaagtgaaggatttcgctaatgtgtatgtggatgcggtcaaagacagcggcagagactatgtgtcccagtttgaatcctcctccttgggccaacagctgaagtaaggaaagacctagcgtggggcctggagcaggtcaagggctgcccatccagggtgggcagagagaccagtgagaagatgctggaactgagctggctagcccttcacgggctttcctaccagctgggcaccatggcaggttccagtggaggactagggatgggattcatctggctgttgggtaaccacagcccctcattcagcctatgagtgccaaatcccttttccttggtaacccccagtactggtcagacagcacccaaaacaaaacaaaacaaaacaaaaaacaaaaaacgggactggccttgtaaccagcaccgaccacatctgtgttcttggtgccttccgccatgtgtacagaggaatgtaaagggaaggcagtgagttagagggttgcatgttcggggaaactaggaccatagcaactgcacattaggggacaggtggcacccagctatcatgtgcatggatctgcagaccaggggcagcgcatgatgcctgggctcgtctctcagccgctctcttccccctctagcctgaatctcctggaaaactgggacactctgggttcaaccgttagtcagctgcaggaacggctgggcccattgactcgggacttctgggataacctggagaaagaaacagattgggtgagacaggagatgaacaaggacctagaggaagtgaaacagaaggtgcagccctacctggacgaattccagaagaaatggaaagaggatgtggagctctaccgccagaaggtggcgcctctgggcgccgagctgcaggagagcgcgcgccagaagctgcaggagctgcaagggagactgtcccctgtggctgaggaatttcgcgaccgcatgcgcacacacgtagactctctgcgcacacagctagcgccccacagcgaacagatgcgcgagagcctggcccagcgcctggctgagctcaagagcaaccctaccttgaacgagtaccacaccagggccaaaacccacctgaagacacttggcgagaaagccagacctgcgctggaggacctgcgccatagtctgatgcccatgctggagacgcttaagaccaaagcccagagtgtgatcgacaaggccagcgagactctgactgcccagtgaggtgcccgcttccactccccacccccgcattggctttcttacaataaacctttccaaaatggaatagcttctttctttgggggacatagggcgggcgctaaggggacatcaagggacgtgagaacatggtgccgcactggggattcctttgtacgcgactactcagctcttaacgctcactcaagctgggcacctggctggttcagggtatgagacagaatcccttcctaagaaggctccaagggaaatggatggccaggcaaagcaacaaggaaccccaaaagggccccacagaggctcagaacactagtgctgtaaaccaggatgagagtgtctggcaataggactggctttgagaccgctggtttcttgtgctagccgagtttccaggtggggtccagagggtgcaggacgggagcctcttccactccctagagccaggattccttcaggagccaggaagattggagttattgggtgggtgctaataaaaagcctggagctgaacccgatctcggtaaacaattccctttgatctttccctccggtgcacccacacagtgtgctgaaagggtcaaggctgcagctactctacctgacagttgggtacaaaaacaaacaaacaaacaaacacccctctccatgatgctggtgaccacacatttactagagaggccttcatatccatctctaaatcctgaaggatggcctttaagtccacaccagttggggaagctgagctgggaggtctgaagttagtcactgcagaaaaggtgggtcaggatgtgccgttccattttaaaacaaaacaaaaacaaaacaaacaaacaaaaaaaccccttttattacatggggctggtaaggtggcttatcagatagaggcactttcggaagtctgaggacctgagttcagtgcttagaagacacacacacacacacaccccacaaatataaataaaggtatataaaatatttaaatttttattagacttatttagtgtgtgtgtgtgtgtgagtgtgtgtgtgtgtgagtgtgtgtgtgtgtgttttcacgtgccacagaacatgtgtggagattagaggacaatttgcaggtatctgttctcttttccaccatataggtcccaaagatcaaaaactcaggtcaccaggattagtgtagcgagcgtctctactagctaagccatcttgccagtccttgtttgtatttatctactagctaagccatcttgccagtccttgtttgtatttattttatttggagacagtgtctccactagcccaggctagactcagatgagctctgatctttctgccccatctcccaagtgctgggggtttcaaggatggtccaccactgttactctgtgctgagacaaacccagagctctgtgcatgcaaggcaagccctctaccacctgagctgcctgccaagcccagactgttcattgtatagacttgcccgctatggagtgtaaccaagcactcatgttcacagggttgaggatgtctgcagaagcactctcacaccaacagccttcctctcatctgcccctcttcatgcctgtgttggtatgcaggtggtctccatccatccccggtgtatcttcatgagcccctggctgaaggggtgagtttttaaatccacaatcatgcagagccacagcagacattaaaccaggtttgggtaggaaagtttcccggtgtggacaatgagacttctggctcttggtggacaggaagagaaacccctattggatttccagagagaacatagtccagtctgctggctgtgccaatgcagtctggaaaggagcttccaacacctggcagaggcttttccggtgccagcaacgtggaaaatggaaagctggccctgcggtgtgttttctcctgatccggggctccactggcactctctgaacgctggtcttttactctataatgtgcaagacctgttttgtgacactgggtctctttgaagtgagtgtttgggggtggcaggaacttagcaagcagcccttttgggattctgaggacactgggtctccattccagtctagaaggtcacctagtttagctatcacagtgaggactgtttacaaggggtgtgcgcatgcggcacctcatgcttttagacactaccatttcatttctacaacaaaccttcaggggaggggcaggtcctacccactttattcataagaaatggaagccgctacactgcagtggggttgagacttatccaaccaccctcccaatctgcctccttcctttccgcctgtttaaaggggccaggcagcctgggctgtgcaaaccagctgcacggggttggtgatcatatctgaccttaagcctggagatgacataagactgctagctagacagatactacactccagccacgtcgtccacgttgtcctgcccttgacaggtttatcacagattgtaactgcaaatctgtcgttacctgatttgatctttcccattaagtcaagcagggaagcggagttagtcccacatacaaaggaagaagcaccccagagaccactaaagaggtggatgacctacagccccaggtccaccccttcaacaggcctagctcatccccatgcccagacgtccaggcacatgggacacccactaacagcagcttcttatccagctttattagggacagcatgtttaggtgagatctagggaggggtgaagacatgagaacatactttccccttaaagcaaccttcaggggccacctggcaggcctggaggggggcagcaggatggaggaacaggcacatctgcaacacagaagtctcacgactcaatagctggagttggttggtcctcagggttagaatcccagaagccggtgaacttgtcagtaaacttgctccagtagcctttcaggaatctgaagtgattgtccatccagcccctggaggttaaagcagtaagaggcatccataggagagagggagagagagagagagggagagagagagagagagagagagagagagagagagaggtgtgtgtgtgtgtgtgtgtgtgtgtgtgtgtgtgtgtgtgtgtgtgtgaaaagctcccccgtgggcagctagacccaggactgcacgcagggctccactggctctctcagccaccagcaccaccttgcctatcacaccccaaaatcacctgcagctacctaagaaaccccaccttcatcaaggttggatcagaacctcagtgccttccatccaatctcctttcaggccggaggcaccaagcaccggggagctggatactaaggtcagctacaatgcagctgcctgtataggccatacaaatcactcccttgaggtaccccatccctggctctaagtgggtgaggcagaggcagggccagtctctcatttgaaacattactgaatgacttctaagctgtgtgatctaggccaggttatctaactctttatcatcagcaaaaccgagtatctaatatcctccccacagcctgttctggggatagagactgtcaacatcttttgctacataggcaactaaactatcaaatgtcagccaaagccattggccagggggtgatgtttcatagtgggcaagatgcctacctcagactgagcccagggatagaaacagggcagactcccaccctctaa

SEQ ID NO: 856 - DNA, 5368 bp, Mus musculus
caatgctagccatttaaagtgggtttaattttcttgagtaaactgcttttaataatgctcccatacgtttccttcctctgttgccaggttgctattaaaatcatagataagagccagctggatgaagaaaacttgaagaagattttccgggaggttcagataatgaagatgctttgccatccacacatcatcagactctaccaggtcatggagacagagcgcatgatttacctggtgacagaatacgctagcggaggggagatatttgaccacttggtagcccatggaagaatggcagagaaggaagctcgacggaagttcaaacagatcgtcacagcggtgtatttttgtcactgtcggaatatcgttcatcgtgatttaaaagccgaaaacttacttctggacgccaatctgaatatcaaaatagcagactttggcttcagcaacctcttcactccagggcagctgctgaagacgtggtgtggcagccctccctatgccgccccagagctcttcgaagggaaggaatatgatgggcccaaagtggacatatggagccttggagttgtcctctatgtgctggtgtgtggcgccctgccgtttgatgggagcacactgcagaatctgcgggcccgcgtgctgagtggcaagttccgcatcccgttctttatgtccacagagtgtgagcacttgatccgccacatgctggtgttagatccaaataagcgcctctcaatggaacagatctgcaggcacaagtggatgaagctcggagatgcagaccccaactttgacaggactgaggacagctgtttgtctgttgcagagtgtgagcacttgatccgccacatgctggtgttagatccaaataagcgcctctcaatggaacagatctgcaggcacaagtggatgaagctcggagatgcagaccccaactttgacaggttaatagcggagtgccagcaactgaaggaggaaaggcagtcggaccccctcaacgatgatgtcctcttggctatggaagacatggggctggacaaggagcgcacacttcagtcattaaggtcagatgcctatgaccactatagtgcaatctacagcctgctgtgcgatcgacacaagaaacataaaactctgcgtcccggagcacttcccagcatgccccaagccatgactttccaggcaccagtcaatctccagcctgacggggctgtgaacttggacagtgatgagggtgaagagccttctccagaagccttggttcgctatttgtcaatgaggaggcacacggtgggagtggctgacccacgcacggaagttatggaagatctgcagaagctgctgcctggctttcctggagtaaacccacagggtccattcctacaagtggcccctaacatgaacttcacgcacaacctgttgcccatgcagagtctgcagccaactgggcagcttgagtacaaggaacagtctctgttacagccgcctacactacagctactgaacggaatggggccccttggccggagagcctcagatggaggcgccaacatccaactgcatgcccagcagctgctcaagcgcccacggggaccgtccccacttgtcaccatgacaccagcagtgccagcagttacccctgtggatgaggagagctcggatggggagccagatcaggaagctgtgcagagctccacctacaaggactccaacaccctgcatctccctacggagcgtttctcccccgtgcgccggttctcagacggggctgcaagcatccaggccttcaaagctcacctggaaaaaatgggcaacagcagcagcatcaagcagttgcagcaggagtgtgagcagctgcagaagatgtacggggggcaggtggatgagaggaccctggagaagacccagcagcagcatatgttgtaccagcaggagcagcaccatcagatcctccagcagcaaatccaagttgcctgtgaaaaccaaccagccctcctcacccaccagctccagaggttaaggattcaaccttcaagcccaccccccaaccatcccagcaaccatctcttcagacagccaagtaacagtcctcccccggtcagcagtgccatgatcacgtctcacggtgctacgtctccctcccagtttcaaggcttaccctcccatggtgcaatcttccagcagcaacccgagaactgttccccgcctcccagtgtagcactaacctgcctgggcctacagcaggctagccagtcacagccagtgactatccagctacaggagccagttgacatgctcagcaacatggccggaaccgcggcaggctctgcagggcggagcatccccatcagccccagcgccagtcagattcagatacagcaccgagccagcctaatggctcccttcagctatgggcaccggcccttgtccaagcagctgagcgctgacagtgcagaggcccacagtgcccagcagcagccaccccactataccacgtcagcactacagcaggccctgctatctcctacaccgccagactatccccgacaccagcagccaccactaatgcattcggagagtatggaggaagactgcttgtgtgaggggctcaaggagggcttcccagacaagagctcaagcacactgaccaaaggttgccacaacagccctctgctcttgtgtaccagtgggcctggggaccctgagcctttgctgggaactgtgagtcaggcccgggagctggggatccatccctacggacaccagccaactgccaccacgttcagtagaaataagggaactgcctggaaaagaagttctcctggacaagcaatggagctgccggatcacaacggccttgggtacccagtacggcccttagtcagtgagcacctcaggtcccggacgctccagagacaccacacgatccagaacagcgacgatgcctatgtacagctggataccttgccaggaatgagcctggtggcaggcaaggcgctgagctctgcccggatgtcagatgcagttcttagtcagtcttcactcatgggcagccaacagtttcaggatgaggaagatgaagaatgtggggtgagcctgggccacgagcatccaggcctgggtgatggcaaccagcatctcaactcctctcgctatccagctacgtgtgttacagacatcatgctcagccacaagcacccagaggtctccttcagcatggagcaagccggcgtgtagcaagatatggaaagttcaagtacagctccaggaggaggctgagtctagaccaatagaccaacagtgtccaacagcgccgcaccgctcctccgtctgtgtctccaccacaacagtgcagctccttcccctacactaggcaccagtaggccggcgcttgggttgcgagggacatttgccatgtttgcttgtatgaccaaggcaccaaggaaataaacaggaaatcagtgtcctccatctttcatgagccagcatctggtgtgcttgagttgagttctgctgttaggaggtttgcttgtgttttgttttggaaattttcctttggagataacttattctctttgccttgcccacccctacccccttgagcatattcccccccccctctcgttttcacctaccatttctgaggtagatgaaccagaggttagtattcaggggctgaacctcaggaccctcccttccacagcctgtctcagaccagactctctccctctgccccggtctaccaggaacaaatgctagaccggagcttggtggccaagaaagggagaggagggggcagtggcccctgcctttggagattggaacagaagaaaaaactgagcctgggatctggcagaatctcctgctggcctctaactagaatcctatctggcccagcagaattccatcagatcccagcacaggccggatggcctggtgctgaaggtttgcaatccagaatggctcagtgtaggcccctctggtgtgtggtccagttctcctccagtcaccaactggttccccctcgtgagtgaacacccaggagtggtgcactgtgctgtttgtgtgatctccattcttattctctactgcgttgtaaaaagggccgttggtccatttgtgtgcacacgtatgagtgtgtacatgcccttccctgcggcctctttgtcacagacaagaattggaggctgtacggggtctcttaaccttctcctctccccagcatcctcggcccctatattttaattcttgatcatgtaggaattgtttttgataaatgttgatattattgttattattgttattattaataaagacaaaaaggattttgtttatttgtttaaaagagaaatgtttaaccagattctgtgctgttgaactgtggcttgcaacttctgtttgaagtgttttccttggctttggcatcgtgagccactctcctgtgccagcagcggatgcagtggcctcccttccccagccgaagcagcacataggcagtggctactgtccttgtcacttcctttctctctgcagtcagaaaccaaagtctggggccaaacgaggccggcccggcttctcttctggtcttcaaaaccagagagggatggtccctgctctgactcccagccctcatttctgagagccaggggccaccaacctctgagtatgcacagaagaaagccgctgcctaccatggcatctggacattaccagcagggtccctagccatcttatccttccgcaccaaccctgaaagcttgcctctttgaacaaatccattgtctcttgaatggatttgttttcaatgtgagagcttggctggggacctgtttcgtggtcccatgtcctccaatttcccctccacttcaggtgtcactaattactagccagaagatgtctgactcccaagaaagcttgacaagccattgtcagcttccaagctcagtccagctctgatgctccagccccgccctgctgctccccacgctcagcctgacctgtttacgtggtactggattgatggaagagcaggcaccaccctccagagccacccagacgaaagccagtgagcctattaaccgtgccatcttgcgaactattttcaagatcaccattgctttatattgtagtaaccaatatgcgcagtatatgttgaatgtatatgaatctactttgctatttctgttctttgaaaatgtaagaagtatttttcctttctcatttctgttgatctaaaaatgataataataataataatctccagattcaagttgctaagagcttttgtccttgtttgtgtgggacatctacaacttagtgacttggttggactgtaggaggttgtggaaataaaaacctgattatgtac

SEQ ID NO: 857 - protein, 1071 aa, Mus musculus
PFKVGLIFLSKLLLIMLPYVSFLCCQVAIKIIDKSQLDEENLKKIFREVQIMKMLCHPHIIRLYQVMERMIYLVTEYASGGEIFDHLVAHGRMAEKEARRKFKQIVTAVYFCHCRNIVHRDLKAENLLLDANLNIKIADFGFSNLFTPGQLLKTWCGSPPYAAPELFEGKEYDGPKVDIWSLGVVLYVLVCGALPFDGSTLQNLRARVLSGKFRIPFFMSTECEHLIRHMLVLDPNKRLSMEQICRHKWMKLGDADPNFDRTEDSCLSVAECEHLIRHMLVLDPNKRLSMEQICRHKWMKLGDADPNFDRLIAECQQLKEERQSDPLNDDVLLAMEDMGLDKERTLQSLRSDAYDHYSAIYSLLCDRHKKHKTLRPGALPSMPQAMTFQAPVNLQPDGAVNLDSDEGEEPSPEALVRYLSMRRHTVGVADPRTEVMEDLQKLLPGFPGVNPQGPFLQVAPNMNFTHNLLPMQSLQPTGQLEYKEQSLLQPPTLQLLNGMGPLGRRASDGGANIQLHAQQLLKRPRGPSPLVTMTPAVPAVTPVDEESSDGEPDQEAVQSSTYKDSNTLHLPTERFSPVRRFSDGAASIQAFKAHLEKMGNSSSIKQLQQECEQLQKMYGGQVDERTLEKTQQQHMLYQQEQHHQILQQQIQVACENQPALLTHQLQRLRIQPSSPPPNHPSNHLFRQPSNSPPPVSSAMITSHGATSPSQFQGLPSHGAIFQQQPENCSPPPSVTCLGLQQASQSQPVTIQLQEPVDMLSNMAGTAAGSAGRSIPISPSASQIQIQHRASLMAPFSYGHRPLSKQLSADSAEAHSAQQQPPHYTTSALQQALLSPTPPDYPRHQQPPLMHSESMEEDCLCEGLKEGFPDKSSSTLTKGCHNSPLLLCTSGPGDPEPLLGTVSQARELGIHPYGHQPTATTFSRNKGTAWKRSSPGQAMELPDHNGLGYPVRPLVSEHLRSRTLQRHHTIQNSDDAYVQLDTLPGMSLVAGKALSSARMSDAVLSQSSLMGSQQFQDEEDEECGVSLGHEHPGLGDGNQHLNSSRYPATCVTDIMLSHKHPEVSFSMEQAGV

SEQ ID NO: 858 - DNA, 133787 bp, Homo sapiens
  misc_feature (1)...(133787): n = A,T,C or G
attgccaagttatttcccgtctttctgtcctgggactaaagtttctttttttcttttctttttctttttctttttttttttttttttgaaacagagtcttgctctgtcaccaggctggagtgcagtggtgtgatcttgactcactgcaacctccaccttcctggttcaagcaattcccctgcctcagcctcccaagtagctggggctacaggcccacgccaccatgcttggctaattttttttttgtatttttagtagagacggggtttcaccatgttggccagactgatctcaaactcctgaccccaggcagtccgcccacctcggcctcccaaagtgcaaaatttcattttttatagtttaatttcccaccataactttgacatttttctttggaaataaactacttttttaaaaatttcaaaatatttctataagttgtaggttgaacacccctaattcaaaaacgaaaaatgcccccaaatcttaaactctttgagtgccaacatgacaccatgtggaaaattctatgcataagcacttaatacaaacttgtttttaatgcacaagattatttaaaatattgtgtaaaattaccttcaagctatgtgtataaggtgtatatgaaacataacgttttggataagggatattcaacctgtattgttattcttattatttttattgttttattttttgaaatggggtctccctctcgcccaggctggagtgcagtggcgtgatcacagcccactatagccttgagctcttggactcaaatgatcttcccacctcagtctcctgagtactaggactacaggcatatgccatcatggctggataatttttaaaaaattttttgtagagttgggggtcttgctgtgttgcccaggccggtctcgaactcctgggattacagcatgagccaccaggccggcctattttgtcattatgccactttcttagacagtgttctttggttgccattttgaactattagaactgccttgttaaaccatttagcttttgcccttttcttccccagatccctaatacttttctgcccaatcctttctctctattcagagtgtttcctgtttgtcctacattctctttctgtcctccttctttcctgctcttccctctttttttttttgagacggagtcttgctctgtcacccaggctggcatgtagtggtgtcatctcggctcactgcaacctccacctcccaggttcaggcgattctcctgccttagtgtcccaagtagctgggactacaggcatacaccaccatgtttggctaatttatatatatatatatatatatatattttagcagagacgggttttcaccatgttagagaggctggtcttgaactcctgacttcaagtgatctgcccgcctcagcctcccaaagtgctaggattacaggtgtgagccctgcacctggcctcttccctctcttttttttagggctttgaggcatccttttcaacagctccttaaccttaaaattaagccatcaatcccattctaagtatctccctcttaaacttctgcaatttgtttaatctgaaataaacacctgaaaatagaaaattgaatatctatattttgtaaataatcctgattgacctttatttttattgtcaactctcttttcctccactccttttttttaaaaaaaaaaaattgttgaatacatttaagtgataaacctgtaggacaagagttgatttaactataaaacattgttggcactttgcaacaataacaatcatgtcagtatgcctgagagagttgctcataatattggagacactcgtaggcttctgttttctgagagggtaaatgtcaaccagatgggaattactggaactgagaaatcattttctttttgtctttaaaaatttctcttctatatcttgaatttcaagtaatcacagaaaatttcctttgcttcagataccatttactaattttgcacagtataccattttccaacttattttcccactttcagtaaactttctgttctctatccagacattggaaatgcatgaactattttacagtcaccattcagtacagcctagagggcagaaaaataaaagttcaaccactcacctaaaaagcactatacattttattgtattttattattattattattattatttttgagatggagtttcgctcttgttgccctggctggagtgcagcggcgccatctcggctcactgcaacctccgcctcctgggttcaagcgattctccctgcctcagcctcccaagtagctgggattacaggtgcccaccaccacacctggctaatttttgtatttttagtagaggtggggtttcaccatgttggccaggctggtctcgagctcctgacctcaagtgatctgcctacctcggcctcccaaagtgctgggattagaggcatgagccaccgtgcctggagtgctatacattttaaattatagttgttaaccactttctgtggagtttattgaaagctgcctgacccttatctttgctggccatgtagagtccttgtgtctcgagttggctagcatccttgcatcccagccattccttaggcttgacagctgcatattttcccagaaacagttgtgattggtgtgtataatgaatagaataacctgttctttccaaatatacatccctgttttgccccttagtacttgatttgactaattgtttcaagctgaaatatagacttcaattaaaaaattggaagccaggtgtggtggctgttgcgtgtaaccccagcactttaggagactgaggtgggaggatccattgagaccagcctgggcaacatagtgagaccctgttgctacagaaaattaaaaaatatatattatccaggtgtggtggtgtgtccctgtagtcccagctactcagaaggctgaggtgagagaatggcttcagcccagaaggttgaggctgcagcgagctatggtcgtgtcactgcactccagcctgggtaacagtgcagacgttaggatcttcccaagaatgtggccagcctacatcctgaccttggtcatgtggcacgttattaatcatggccatttaatgtgtaacaggttgcattcaagagcctagcttgtgttggtttggggttcttttaaatttgttttctgttgacaattctattttctagtaaattttaaataaaaatgttttttcattaaggctgattccaaaggtacttaagttcctttctagccagccattcttagctgggtcctgtgaaagcattatgccctatagaaaagaaaattgagtgactattttctcagttctcccaaacatggtactattctagatgcattgaagagaagtcaattcattacatacagtgatgctttaagggcagttgttctcagagtttgattcagggatgtcatagactccaatactgtttcagtgggttccctaggtcaaaaccatttttaaagaaatgccacaacattattttcacttttcattcatagtctctcacaattataaaatagagatttccagagactatgctatgtatgatgctgcaattgctctgatgaccaaggagatgtgtggttgtatacacgtgtcttttaaatttttgtcttaatttctgatttttaatttgatttctaagcaaatattgaaagatattactcacataatcaaaacttctttgaagtttctcctaacttttaagagaaggagtcctgagaccaaacagtttgggaactgctgtcttaaggctgtaagacttaattctctgagagaacccctcctgggaatggctgcacacaagggcagtacagtaaaccagtcagttgctcaatagacattttaaaaattgaattaaattgagctcctagaatataacttttgagaccttatttgagattttctcccaaggcaatgtttgagcattgagagccttgtaacttgggccaggtttctgtgagatagacagttggcaattctcaatatcaagtcaatgatttcagaagtcattttcaagaaatacgtcctttaactggtagattaattatgtagcctgttggcattatgtagatcagtgccgtccaagagaaagagggcacatatattatttacaatttttaaataatcatattaaaaaagtaaaaagtggtgaaattagttttaatatcttttgtttagcctaatatatctaaaatattataatttccacatgtaatcaatataaaaatgtatcagggagatagtttaattcttttttatattactatctttgaaatctggtatatattttacatttatagcgcatcagtctggatagttacacgtggctggtgcctactgtattacactgtacagatctagatcataaaatagttgtagagctgagccgagaatgttctagagtagataagctttgtcataaaaatagagaataaaaattttgctacagaagttagtataaaaacataaccccattgaaaaaagcttacaatgacaaaatgtttgatatctgcctaaattctaaagacatttctaaaagaaatagagctctttccttaaaacaaattttttaaaaaaataagcttttcttcaaactgtaatgttttctctttccttctaaaaagcatgcagtctgctcactatattctttgaaattactgtatgttcatctgcataccagtgtaaggagatcctctttctcgtcttggaagaatttgagcccttgtgatctttgcatttccctcctacgtagttctttcttgaactgtccatttgtcctggcatatccctgaatccgtactatctgctatagggcatttatttctgatggggaagggtggtttgttttgatcttaatgctgaactgtcccttagttcattgtcttttactctgttgccgtatcttgcttacaaatatggtgtcagaatatgcaagtgaatttattgcctgttgtgaagaaaccactatttttttcagcttcattcactatgaacattattgtgcttacaaaagtgagttgagttaaaaagaactgtgttttttagaagtgagaattaaaagggagaaatagtaatttttcctctcatagaatgaataataaagaactatgactttaaatttggcatgatctaaatttaatttttttcctaccacatgccaattgaaacagaagaatttgttgaatgggaatgtcttgagtagggaaattaaggactctcacaatctgttatctctttagtagcatacttgatacagtgtcatgtttaattaatattagaatgtcaatttacaaaatcatgctctttggaagataaaagaattctgtgtagaacaggcaaacttaggaaatatatggtctcttggtaacatgttggaagttttctgctttgttataattttcatatgtaagtacaattaggagatttatagattttcaaccccaatataataacattctttgagagtttatcttttctttacctactgatttacctttgttgtggacacattcagtttttcaagcaactggtgtgtactttacaccaaaacctttattatatagtcttcagtaatctgtagctgtgaaactcatactcatttatctgtttagatattctcaaaacaatcatacctgtgtgccagccacctgctgtctgacttggcagtttctctgttccaactttatttttctgctttttagaaaactcccactttccagtttgcagctaaggtaggagctgagttcctttccctgttaagtggtcttatcaggcagttatgccattgccaagcaacagtaagttctctcctctcaggtgttagctagtaggtagggttggcaaggggagcctggcctgctgtgaagaagtagaccagtgtctctctgccacagccctcagggtcgggtcttgctgtgggttccatcctatggctcactgtgactttcctgaatggaatgcgtttattttttttccagctctgttctttccatgttcttcccacatcagctggcggcagccagttggttctgaatgctgcccacaaattgttagctattttgcttcttggtccctcaatttgtcccttgaataaggaattgatgtgtttcagatccaggattatgttgcttagtgaagcaaatctaatccttgccaaggaatgcctaaagttgaaggcttgattccagaagaaaataaaataacaacagcactacctgtaattaacatatattgcctgtttactgtgccaggcattatattaatcaggttgcatgtattagctttgttaatccccaaaatcactttaaagtaggttccattgttgcccacattttacagatagggagccattggaaaattaagtaacctgttctaggttatatattaagggatagttccaagattttgaatctaagtagcttgtcttcagagtccttgctttcagtactatattcaactgctaaataaagcttcactttggtttttttgttttgttttgtttttttgttttggagaaagtgtctcattctgttgcacagattgcaatgcagtggcgtgatcacggctcacttcacccttgctaggctcatgcaatccttctgtctcagcttcctgagtaactgggactacaggcacacactaccacacctggctaatttttttattttttgtagagatgaggtctcactttgttgcccaggctggtcttgaactcctcgcctcaagccatccgcctgcctttaactcccaaagtgctggaattacaggcgtgaaccaccgtgcctggcccaaagcttcacttttcaatgtcttctggaatctgaactctcactgaagagtagacaggagtttgatgttttaatctattaaaacttctttgtacgtgccttctaagaacagattatattcaatgcaatttttcctgaaaagatgaagtacatttgtttgtaaaattcatgtatgtatgtatttatttattatagtacatatttatggggtacatttgatattttgctgcatggatacaacatgtaatgatcaaatcagggtaattaggatatccattaccccaaacatttatcatgtctttctgttggtgacatttcaaatctccttcagccattttgaaatatgtaataaattattgttaattatagccaacaaaaggcattattgctagtacagatatttcttgacttatgatgggttacgtcccaataaacccattataagttgaaaatatggtaagtcagaaatgcatttaattcactctattgttatctacccacgtgattgtgtggctgactgggagccacacaatctctgtttaccattatgaagatcctattgcttcagaatgcaaatgaaatttagagtgagtgccttgtgaatcagggaggccccactatatgactccctgtgatctcttggaggtgaaagaatgcacaaatttcataagttaacctgaaggtcacccgcttttccccggttacattgtacatgccatcaattagtagggggtgggcagaggtggaagatttcaggcacaggccttagacagttgatgccctctgttattaaggtaaataaatcctagcagttcttcccaccttttgcacatcatggcatgcacagaaagttgagattggaggtgatccattattgcttgtaacccatttccaacacacttgtttggaagttctttttttttcttttgagacagggtctcattctgttgctggcacgatcatagctcactgcaacttcagctcccgggatcaaactgtccttccacctcagcctcctgagtagctgggactacagacacatgctaccatgctcggctaatttttaaaaagttttttagtagagatggggtttcaccatattgcccatgctggtcttgaactcctggactcaatcagtctgccctccttggcctccgaaagtgctgggattacagctgtttggcagctctgctatggggatatatctgcaagtttctaagcttgttatatttatgaaagcattctgtacattacaaggtgccattcacatgtaagattttattaataatgactattaagaccaagctatttgttctaggaagagacattgtgtaccatgattttttttgttgttgttttgggagctgtcctgagagaagcaggagcagatgctagaccagttgtggagttaaggtcttgtatgtgatctggtgcagtaatgaggagaagtagaaatgcaggtggtcaagggttatattatccaagacttcttacaggaaaccaagcagctggtgagatcctcattaaattctctaccttcttctctgcctatcccagttctctctgtagtgaaattctgctttctttgtcaagtctttcccagactttttctacctcttctcctgtaggtgaaggtcattcaccatcctctgtctgttgttatacctggtacatagctccattgcttgtacttccaatgctgcattgttttcagttccacacatcttttttcctttttagactgtgatctccttgaagttgaggctgtgtctgattaatccttgtagctccagccacacccagctcctttcatcacactccctcgttaggcatggcttgaatgctctttgagtacagctgaaatttatctccctgtgcctttctcccgtgggtcctcattttaacacctgaaacagcttcagataaagttacttttatgccagccatttatacatctgaataatctgccacgtatggctccaaacagtctttatttctctgagctaaacatttttacttttgtaattttgttttcctgattttttcctcagtaagtactgtatatgttccctttacctctctggtgcatagaatcttagaatgttaagatttggagaggactagagtttgactagtctaggttcttcatctaaccagtattgcttccatactgattacataattgaaactgagatatagacatattttggagcaacacaaatattttaagtatttcactgaggaagtttagatttagtaaatttttaaaagtccttcatcgttcattcttcattaaaatgtatttgctgatgagtatcttattaaaagggggcacattggaaagatatgttttatgatgcagtgcatgtatgctaaagaaagatcttcagattcttataacattcttattaagaatttgattctaaagccaagctacctaggcttcaatcctgcacctgccacatactaggtgtaaattacttaatcttgggttaattacttaatctctgtgtgcctcagtttctgtatttctaaagcaaggttaatgataaggtgggtgttaggaggtttaaatgagttagtacttccaaaccactaagagttatgcctggcccatagtaaacatttcgtatatggtagatgctgctactgctgctgccaccaccatcactgctactattattattattattgagttctacaagcatctggtgagatgtgtaaagcccctgtgaaagttctcatagaaccttagtaagacaccatgtatttatgatacaagcttcttgcctttttaaaaattttttattttatttaaagcttcttgtcttaatgagagaccctgtataccactctgcactgaaacatgatttgacccagaccgtaacgacatctatggagtaataaagtattttttcataggattttaccgtataagcaattgaagaaatggcagaagacccattagcttttggagtctgttcctttgagaccaacttgctaggaatccatttcctatctttttaaaaagagtaaattaattttcctcattgacattctgtaaacagaatactggcagcttatattttatggaacgtaatgttttaaagtgaacctaatttttcttagtaaactgcttttaataatgcatcagagtaatttttttccctctgttgtcaggttgctatcaagatcatagataagacccagctggatgaagaaaacttgaagaagattttccgggaagttcaaattatgaagatgctttgccacccccatatcatcaggctctaccaggtaggatcattagtgtatagcagatagctgcaaagaacccagaatattgtatgtatggctccctttgaagaaatgtgggtgggtgaacatctgtgactttttttgtttctatgttaatcctgctatctttcctacccttctgtttacgcgctcagcacttagtatcctcaagtttcccctggccatttactagtacgttttccttacccaggtaggtctttttaatttgttctttaaaatttgatgccattcttagcaacaactacacaaaatgttaattcagaagatgatgagaatttattttatttagttcagagttctaacacaggatgggaaactcaaaaagaagagaatttagagaggtgaaaagttagagatgaatataacatttttttaatagcattatttgaatactagtttctgtgatcatgttataaattgttatggcaaaggactgcttcttggatcaatcaaaacctacctcttttctattctaataggattgtagacttagttttccaaggtagtaattattttgataatcaagagaccagatcaagtgaccagatctctccaataggagagatttctattttagttttttttttttttggtcttcccaagaaacatgcatatttcatgccatcatcaaaatgattccctagcataactacaaaagcagtaaatctgatggctggaatttcaagcgggataggaggagaggaccttgccttagcaggctggtgaaagagatattttgggagaggtggggcttcgggatgcttctcaaattgcaatgtgttggcagccgagaactttgcctctgcataggcccaactctacttgctgctttctgccagaacagccatctcttagttctgaaggacgtggccacccacttggttattttgctgctgttagtctgcagtaaatggttactggcccagacataggaccatgtgtaaaagtggagaaagtacacccaaggctctatgggcaagctttcgtagcctcttagttttatggaaaagaaaacatgttgtgatattaacatgtgtggttaaaactacagcgttagagctcttccctggcatcagctgctcacataatgaaattaggtcaacaggagcagacctgttgaaatttatcagcctaaattatgttgaacaacgcctaccttctgccccacaagcaaacttatgaaagcttcctggtgctgcctgaagacctatatctgtgagctcacaggtgtctaacctcagcttccttcctatcctgatgggctgaataaatttcttgaccttaccttttaaaataaatcatctttaaataattgtggggcttaggctgacctttctcaagaggttgacttatagctattacccttgtaactgaattctgcaagtttgcctgtcttacccaagattagcctatgaggatttccacaggtccagtgctagctttgagcagtgccttctttcaagctttaattttgctttctggcagctgggttttttaaattttatttatttatttatttatttatttttgagacgaagtctcactctgttgcccgggctggagtgcagtggcatgatctctgctcactgcagcctgcgcctcctgggttcaagtgattctactgcctcagccttccaagtagctgggatcacaggcatgtgccaccacgcccagctaatttttgtatttttagtagaaacggggtttcactgtgttggccaggctggtctcgaactcctaatctcaagtgatccacccacctcggcctcccaaagtgctgggattacaggcgtgagccactgcgcctggccggaactgaatttttaattgtatttagttttaattaatttaagtgtaaaactaaaaataattttaaaaagaattgttgaaatgatagtattttggatatattggggtaaataaaaagtagtattagaattatcttcaccttttcctttttcctttttaaatgtggctactagaaaagttaaaataatatatgcagttcatattatatttctattggacagcactgttgtagaaagatatacaataagcagagaacagtgttcctctggggattgagatggaggagattgggaagaggaaagcctttggtcttttgttttataatgagtgtatgtaatcattattacttttaaaaatgtttgatggaaaatgtaaaaaggaagaaaggactgacaacatactacaatgaattttaaaaaggagcaacaaagggaccaagacaaaacacaaatcacttacgttactttaaaaggttgagtattttaaattactgttctctttttttcaaataaatgggcagtggaaaggaaagttgtcatttctataaaaaaaagaaagacatatgtgatttctgtggcgttcttatgtgactcccattattttccccaaaggcttctttttgctttagtttttttttttttgatttgatagggcatttttgtgcttcagatgattgatgttgaatctgaagtttaagttttggttcttgacaacttctttgcctctcagttttatggagcttaagagattgcagagacctcatggaacatcaaaaagcctatctctctcaagcaataaatgtttcctacttttaagaacttggaggaatatctaattttccctttcttcttaataacatttatatttgtttccccaaaaatgttttaaattttctttaatctatagtggttattaatatttcaaatgagaaaagaggagtcattagtttctcttcctgtatcagcctgtcatttgtgtcactgtctgtcactttcctgcctttgcaccaggttatggagacagaacggatgatttatctggtgacagaatatgctagtggaggggaaatatttggtaagtacatttattgcattctttaaacagctattgagcacactatggcaaacctaaaatagctgttcagtgcctttgtcacttgagcagcagtcacttgatgctgttcttcaatcctgccattttctatcaacaaaggcattttaatttgttttgattaatctagtaaaatccctttaacacatttgtttccttagcaaaggtgttttgtttatttcagtcaggcgctgacagttgagattaaagatctccaaaaacaagcatcctttctgaacgtgggacttagggtctttcctgtttgcaggttttaattgaggttaccaagtgcgacagaactcacacaagtgtgtgggcctctgttgtgtcagaaagagccacttagagcacataatctcacccgagtgcgttccttaaactttgtttaaatataacatgtaactatattatttaccatgtgttcacagttcccctcagtaattcttgtaattttgggggttctgccttcagtagctatattttcctctcacacttagctttagcacaatgtcagaaataagcaagagactttgttactgacaaatctgatttttaagatgctaaaaactgacaaaacgattttttttctaacagtgataaatggagccaagtagagttaaagggtaaacttccaaatctaaattgatgtgtcttttattttttcttttggcaactaactacagagaaaagtttctttatatactttatttgtctaatttcctcattttaaaaaaaatttatcaatatgaacacttgctagtttaaaattttttaatttttattttaaacatttgctccttcctgcacgataaaatgtatttaaaagcatagaatcacttttaaaatgaatcttcttattaatgactagtcagttgtggctgcatggatgtgtgtgtgtgtgtgtttgtgtttttaaagtttccctagcgatctagtgtttttttgtgtgtcaaagtatctttagggtaagtgctagtcctttttaaaagaggtatcattatttcttaattttatatttaattggctttgtatatgtgattagttaatgtcaaagctaatggtgatagaaatttatactcaatatagtatgggaggggatactttattttaaagaaatgaaagcattacaagatttgaaggatagcattgtttgtcaagaaggtatagtaggccttcactatgtatgataattatatgccaatcatgtgccttggagatgctgactcaattaagacactggttttcctttccgtggagaaatctggtggaaaacagacagggaaatcaacatattactttgaagatgagaatggaaactgtaaaactctgtatagtagagaacagtagtgcagatggcagtttggttaactcttggagatcagggaaatcttcctggagggcatggttatatggaaatttatgaaccagaaaatgaaagcacaagagagaatatttggagagagagaaatagcagtcatgttattgggagactatactatggtctgacattccaggcacatgttatgataaacctgccttaattaagatcacaaatgtatacaaaggcaaatagaaaactttcattatctagataaggttttttctttggacaaggtattgctctgctgccctggctggaatgcagtggtgcaatcctagctcactgcagcctcgaactcctgggctcaagtgatcctcctgcctcagccatctgagtagctgatactatagctgtgcactagcatacctggctaatttttaaatttttagtagagacgggggtctcactatattgttcaggctggaagatacctttttacaagttttattctataaaaagtcaaacatctcccaaatccttgagctgcctgttaggtattttatttcatagaacgacatttattggtggggaaacaatggtaatttggggagaaaaaagatcatgtcatcttaatgtttgtaataaaaaaagacccaaacacagggcacatcaatctaccttactctttaagaaagcagattttatttatttatttatttatttatttatttatttatttatttattcttttttgagctagggtcttggctctgttgaccaggtgaagtgcagtaacgggatcacagctcagtgcacccccagcttcctgggctcaagtaatcctcctgccttagcttcctgagtagctgggactgtaggtatacaccaccatgccaggctaatttttaaatttttatagcgattaggtctcattatgttgcccaggctggttgtgaactcctgggctgtagcaatcctcctgccttggcctcccaaagtgttgggattataggcatgagctactgcacccagcaggaagcagtattagagagatccgtttcttggtcctggacttcatgtgaatgtacctcaagggatgaacaaacagaataccacttctgataatgttattttaaaaacaaaatattttaggttggtgaaaaagtaattgtggcttttgtcattgaaagtaatggcaaaaaccgcaattacttttgcaccaacctataattatatattgtaacacatattatgtaatatataacaatagaatttgaaatgttattattgatactattaagtaatattattataaaagatccagatgtggaagaaaatagtgtattacctaaagaaattattgagactgcacagggatagaactgtctcatgagctctgatttttaaaaatgtctgtgtaaaaaagatgaaaggggcttagtcaagaaaacctgggctttggatgtatttagacctaggtttgaatcagatctctgtcacctatttgcccttttacttagagcaaattactagatgattctggtgcacaggttccaggtctgtataaggtaagatctagaatatttgtattatagttgtgaagattaaatgagatcgcatatatagagctctagcacagtgcttccttacgccttcatgtgagagagagatcaacttctgccgtcaaggtgtgaggagctctgctgacctgccttgcttgctgaaacaagtgaaaactattaaagaaaacaaaacccagtcatttaaagtctctggaaatcgtcctaagagtaagcagaaaatgaaggaacattattcaagaacatctgtgcaaattcggtaagaaacaaagtctggtcagcaaggtggaaattcccgtccaggctactgcagccaagaacgcagggcttccttctgtcaaaagacaaaattgcaagtttagtttgatgatcccagttggctttatttgcgattctagaatcggacaacatttcatttcatagaataagtgttccagtaagttgagcagaagagtttggcttatggacagaagggcttaagaagtctgaacagtgtattggttacttttaaacagaacaatagaaaattaaccagttaacatcaggttacttcgggctaccttttttagtaaggattaaagcagagggaacttcatcattgtgccagttaaagattttagactgggctgtttgggaaattggctgttatctctttctcctgatttctcaggtcagataacaacctagttttcgctttggaactttagcatgagtgactccattttgatatttagtttggtctgttggtgcctagtgcagaagtttattcgaaaacaatggtctcctgtaatttttatttgtcacttctcctcaattctctccagcatctgaatagcagctttcttcccaggaggatttggacatcagcaattctcattctgccccgagctgcctattgctgagtcctggagaagtgcagttaagagatgggggccccttcttctactcagcccccacttgtggaacttgatcaggtatgccgagaatactaggacccagatcactcttgccttgggtattaagacagtggtttcactgtcttttgctgctaggagaggcaagctgagaggaccccaggctgctgtcctcccccgctctccatccaccaaactctcagttcctagagtgggagcgtcactcagagaagtttgctgttgtccccaaccccagctccagagccctaactctgagatttttacctgtggagaaaaacaaaccataaaacagctcctaatttcttcccaaaggaactgacttcatttgcaacagggagtgaagaagttcaaacctgattgtactctcaagaacagtagagggaaaagaaaaaagaaaaagaacagtggaggttgtggtaaaggacatttgagaagagattcatgaaacaggccaaatggtaggtttgctagttcgcagggggagaaccaatgaattaatttagaaagagcttctctgggattagaatgaaaataaatcactggctgggtgcacacctgtaattctagctattcaggcaggaggatggctcgagcctaggagttggaggtcagcataggcaacatagggagaccctgtcttaaataaaaacaaaaataaaacaaaaaaacactgatggcaaaaattatttcttcaaaggaaccagaatttgattgtattgtttgtagaccaatttgtgccccagggcattattcaaaacaaaagggcaatcagccagcaactagtggagtttaacggctgagtatggtcagtaaatgagaggaagaaagtcctagcaaaaacactgtgatcccaaggtaactaactgtaggcataccgaagctgcctgttccagaggaatcacattagaggctgaacactgtaaatatggagaaataaacttcactagaagaatctagcttttagctgggcatggtggcatgcgcctgtagtcatagctccttaggttattgatacgagatctttctaactgtgggcattttacagctataaatttctctctaagcatgctttggctgcatatcatgagttttagtatgccgtattttcattttcattcatttgaaagtattttctgaattcacttttgatgtcttgtttcattatttatttattagtgtgttgtttaattttcacatatttgtgaatttcccgaatgtttcctactcttgatttccaatttcattccattatagttggttgtttttctatcctctatttcataatttctgctataatatttgttatttccttctttctgcttgcttcagttttagtttgttcttcctcttctagtgtcttgaagccaagcagaaagaaggaaataaagattatagcagaaattatgaaatagagaatagaaaaacaatagaggatatcagtgaaaccaaaagatagttctttgaaaaaatcgacaacattgacagatctttagctagattgacgagagagagaagagaaaaagagaagactgaaatgactagaatcagaagtgaaagaaaggaacattactacagtcccttaagaaacaaaaatgggctgggcatggtgactcacgcctataatcccagcactttggtatgctgaggtgggaggattgctttagcccaggagttcagtaccagcatggacaacatagtgagacctcatttctactaaacataaaaaattagccggatgtggtagcatgagcctgtggtcccagctacttaggaggctgaggcaggaggatcacttgagcccaggatgtcaaggctgcagtgagccatgattgtgccaatgcatttcagcctgggcaacagagcaagaccctgtcttaaaaaaaaataaaaatgattataaaggaatattatgaacaactatacatcaacaaatcagctgggcttggtggctcatgcctataatcctagcactttggggggctgaggtgagtggattgcttgacctcaggagttcaagaccagcctgggcaacatggtgaaacaccatctctacaaaaaaaaatagaaaaattagccatgcatggtggtgcacacctgtagtcccagctactcgagaggctgaagtgggaggatcacctgagcctaggaggtggaggttgcagtgagctatgattgcaccactgcactccagtctgggcaacagagtgagaccctgtctcaaaaaaaaaaaaaaagtcagcttagatgaaatggacaaattcctagaaagataccaactgttgaaacaactgacttaagaagaaatagaggccaggcacggtggctcatgcctgtaatcccagcactttgggaggctgaggtgggcagatcacgaggtcaggagatgagaccatcctggctaacacggtgaaaccccgtctctactaaaaatacaaaaaattagctgggcaaggtggtgggcacctgtagtcccagctacttgggaggctgaggcaggagaatggcgtgaacctgggaggcggaacttgcagtgagccgagatcgtgccactgcactccagcctggacaaaagagcaagactctgtctcaaaaaaaaaaaaaatacatacatacatacatacatacatacatacatatatatatatatatatatatatatatatttccctagctaaagtaaaaaatggtgttctggttgcaaattgatagtctttacttcatttgacctctttgtagcatctgaattcttgactgtttccttctaaagctcttagttttgacttccacaaatgttcaacttctgattcttctattgttcggactgttccttcttagtatcttttgctgggcctcctttctctgactgctagaacatgttgacatgttgtagcatattctctgactttatatatatatataatatataaataataattatatataaaatatataaataattatatattgtatataaataataatttgtatataatatattatatataaataataatttatatattatatattatatataaataataatttatatataatatattatatataaataataatttatatattatatattatatataaataataatttatatattatatattatatataaataataatttatatataatatattatatataaataataatttatatattatatatatatttttttgagacgaagtctcactctgtggccatgctggagtgcagtggcgcaatctcggctcactgcaagctccacgtcccaggttcagaccattctgcctcagtctcccaagtagctgggactacaggcactcgccactatgcccggctaattttttgtatttttagtagagatgggttttcaccatgttagccaggatggtcttgatctcctgaccttgtgatctgcccgcctcagcctcccaaagtgctgggattacaggcgtgagccaacgctcctggcctggctagggaaatattaataaaatggcagaggtggagacagatgttaaagaagtggaggcattgggtgctattttgagaagcattgctctgaaggaaagaagggagaagacagtagtttgtacaggaagcaaggttgttgggagagagttctccacggatatctcacatttcttcatgtttcatgagtaaggcactgactgcctttgttctagactgttttctcaaggatgtttatatagtgagcacccttgaaagacagagatagtatctccctccacagctcaaagatctgtttattgcccagtgtgaaagattccctaagctccaagctcagggttcctctcctataatggacccgactgtgtgtgtaggcgtcatctggtcccctttgcagtgccctgtgaaaattagggcttggggaactgaagcaaatatgttgatgttcatgctgcttgctgtgccgtaagtgacaaagtcttttgtctctgacagaggggtttcctatcttctgccatcacccatgtaattgtggcaggttgagttattagcttgcagaaatggtgagatctcagaccctcttgatacttgacaggaaataaggaggggtttgttttattttgattcgtttaaatatgagacttgattacaggttgaggttgaagatgcagtagtggggaagatgagtttgaaaataattgatatggaaaacaatctctaaagcaagatcaatgaggaactgagggatgagcataattgcaagaaattagccttgcacatgaagaaggatagaagataaaggatgcatgtgggtgtaggcaattttttaggtagaagaatgtgaaaaagatgtttcatgcttttcatataattttctattgagagtagcagattatgttatcagatgaattaagggtgagagggtagagacctggatcagcatggagaaagtgaaattagctgcagggaggaatgagagagagggcaattaagaatagctaaataagttgattaaaggccttagagataggaaacagttaacttgttattccattatacagaattgagtgatttttttcccctaccaccaatgctcaattacctgtgtgtaaattgaataagacagacaattggactgatcctgtttagagtttacaggacatgtgcaaatgaagaggcaacaggtgacaagggttttgaggccactagcaataatgtaattaaagtgtgggcttttgggcttaggctgaagtgggttgggaaggcaagtgagaccaggatgactgatcttaaataagaatttttaaagctggctgggcatggtggatcatacctctaatcccagcactttgggaggcccaggcaggcagatcactggagcccaggagtttgaaaccagcctgggcaacatggagaaattctctgttatttaaaaaaaaaaaaaaaaaaaaaaaagaattcatgaagctacaggtctagatgaagttgaaaagcaagtgtgttagtgtgttgggcatatgaaggttggagagatgaaagtctaaaactacactgcccaacacgacagccactgtccacatgttgctgttgtgctcacgcctgtaatcccagcactttgggaggctgaggcgggcggatcacgaggtcaggagattgagaacatcctggctaacatggtgaaaccctgtctctactaaaaatacaaaaaatgagccaggtgtggtggcggacgcctgtagtcccagctactcaggaggctgaggcaggagaatgttgtgaacccgggaggcggagcttgcagtgagtcgagatccagccactgcactccagcctacgggacagagcgagactccgtctcaaaaaaaaaaaagaaaaaagaaatgtagctagtgcccctgaggaactgagttttgaatttaatttacatttaaatttaaaaactgaggtattatgaaaagttttaggccagctgtgagagttagccaactacagactaagagagcatagtctccaagatcacccctcactctgctgtcacctacaagttcaggaaattcccaaaaccggttcagtttgataaatagctagaaggattcacaaaattcactgaaagctaatatactcccggtttggtttaatacaggtaaaggatacagattaaaatcagccagggaaggaagtgcagagtccaggagaagtacgaaatgcagaacttttgttgtcctttccatgtggatacaagatatgttacactcctggtattgatgtgttacattgtgtacagagcagtacccatcagggaagctcagcccagcctctgtgttcagtgtttttattttacataagcctgattgattgattgattgctcacatgattgatctgtgtgtctcggtcaactgatgctcgtgacccaaagcccacacgtcaagtcacgctgttgtgcagccaacaatgtatatccagcctctaccctgagactatatgggtgtggcgaatcccagcctaaatcatgttattagactctctggcatgacccaaggctcccagacagagacactccgagcagacataacattccaagaacccagagactgcttcccagaagccaagggaaggccaggccttctctttgggtaaggccaagttcttcactctgcagagtctaaaatatttttctattaaacgcaactcttattttgataaaactacattacaccttggctatagacaacttagtattttagttgtgatacgcttataaagtataaaatacacagtggattttgaagacttactatgaaaaaagaaggtaccctatctcattgctattatttttattgattacattctgaaatgatcttttgatgtatttggttaaagtaagttactgattttcaaaatgagtgctttttttttttacttttaaatgtgattacaagaaaatctgaaattatataaatggcacacattgtattttatttgatagtgctaatttagaaggttaagataagagagggggaagtttagaatttcagagttaaaataatgtcaagcaaagacaagttcaagatgtggccataggaatagttgctatacattggtagagttctaggtcaccggagagaaagaaggctaaaggaaccatgaagcaaactgtcaaataagttatcctcattgatgttcacattccctaggtgatggcagaatttgagtggagggcgcaatagactacaaactaggtttcggtgagtgtctttgatgaatgtgaaggcaagagaggcagaaagggagtataccagctgcccaaacatatggcgtagtattgttagtggagaccttgaagaggttacattaattcctaatccctggtggaatattgtccctttttacctcaagaggcctgtaaaggaattgctagtcttagaggagttggttggaaaagtgattatcaatgggaggtgttggccccgatgtaaaagccctgctgcccttctttgccctctttgtccctccttaacttttgtgacccatctcaaatgttattccccctgtgaactctgctctgattttgccaaatagctaattacctttttttcttcactttgaacatacctctcctatagcactttttgaagtaattttttttttcatttctaagtttgtcttttactggtaatttagactctggtccatttctttttcctttgactattttccaaggggcttgattgaatccatgaatatggtgcccacagatagagagggaagactatatatgctgaattcaatcacttatcaccacctccataactaccaatctggtctaagccaccatcatgtcttgctaagatcactgcagtagcctttaaatagtctctctgaatctgccctgacttcccccccgattatagctagaaggattcttttaaaattcaagtgggaccttaccactgagctacttctgttggctttcccatctatttggaataaatttataattcctactatagcctataagattatataatttggtctcctgctgtctctcaccacagctcctagcactctcctcctcacatcggcatctttctttttcattaaacccttcgctgtgctcccgctttaagaccatatattccatttcttcttcctgaattactcttttcctacatatccacatggctgtctctcctgtttcttgccagtctcttatcaaatgttatctcattagagaggtgtttgctcaccatgctgtctaaaatctcattcttcctactggcccattgctctgtagtctctgtcttgctttacttttctttttggtttttatcatgaactgacatatatttatttgtttttttactgtcttgagtcaataaaatttacgtgccattaaagactttgtcatttttgtttcctaccaaatcttcaatactcaaaatagtgcctacagggaatgcatgttccataaatatttattgataagttgaataaaatactaagtgaatgaaagaacatcactggattgctgattatggcgtttaagttttattcatctgtgtcttccttgtttaatgtagtgtctaacatatagtaggcactcagtaaatgtatttcattgtgtcataatgaaatataactaagtcaagcatggaatttgcatgttatttaataacatcttagttaaatgagtttttgacatggggaaagcaccttttttgggtaactgtatagagaaagacatattgaagattatgaattctaagcagtgtaataaatagacttcagtaattggttatttcatgaatatttactactcattcaattgacttatccagtttatttttgcatactattcagccttatattatgaaggagcagtgatgacagtgtgggtttatttaatgttacaaacagaattgagaaactggttagttttgtaaaccactaaatttataatttaaaacttccacactctgatatctttagatatatatccccaaacttcctatttgagaccatgaagtcataaatccagcactttatcaagcaaaatttcctgaataccaggcagaactcatgggcatttaaaacaaattactaatttaagaggagtctgttgaaatgtgtatgatttattatgaacattctcagtgtcttaaaaataatatttcttaatggtgccaacatgtatggaaccctgaacttctcacaaagccattcatttatgccataggtcactcaaaaactattaggacagaggatcagaaagactaacttgcataaccattgtgtacaagatactgtgttaagtgtttcacataggttattttatcttgtgactgcctggaagttcaagaatacaacacatttgtttgaacactactatgtactggtttgttgtggcttttttttttttttacatgtttttatttaatccgcagcatcctttatgtcttcacaactaaactaccattttcccactagtttatttactcctttgattattaaaaaagctattttcggccaggcgcggtggctcacgcctgtaatcccagcactttgggaggctgaggcgggcggatcacgaggtcaggagattgagaccatcctggctaacatggtgaaagcccgtctctaccgaaaatacaaaaaattagccgagcatggtggtgggcacctgtggtcccaactacttgggaggctgaggcaggaaaatggcctgaacccaggaggcggagcttgcagtgagccgagattgcgccactgcactccagcctgggggacagagcgaggctccgtctcaaaaaaatcaaaacaaaacaaacaaacaaacaaacaaaaacttagctattttctaagggtctcctaacaagcaagtaaccatgctactgaactttagtcactctgaatcaaaataattgacttgtatttatttccctaattaatttcccatttattattattcattttttgttctgttttcttaatatcagatatgactaacatttattttatttatttatccttttttttttttaatgcccccaccaggagtgtgcaagtggagagatgcatggatgaaggaggggagctggcgggggtgggtctgtgaccagcatttatattgtaactggccaagatgtatgaggaagccacctgtgctttgacctcactttacactaaaacattcatttatagtctgatcatccagtcatttctaccatgacataaaaataagagccccagagaacaaatcaaattatttttgctgtattgagtatatataaatcccaaagggccaggcatggtggctcacttctgtaatcccagcactttgggaggctgagatgggcagatcacttgagatcaggagttcaagaccagcctggccaacatgttgaaaccccgtctttactaaaaaatacaaaaattagctgggcgtggtgacacacgcctatagtcccacctactcgggaggctgaggtacaagaatcacttgaatatgggaggcagaggttgcagtgagccaagatcgcaccactgcactccagcctgggtgacagagtgagactctgtctcaaaaaaaaaaaaaaaacaaaaaaaccttaaaggaatatttttgcctggctcctacattaacatttactttctctgaaaatcataaccctgtgtttgttattatccagtgtctacaaacagcccagcttctatagttaggtaaagtaaattcaatatcagttgttctttcataatcaaaacagaagtctacaatgccattcttacatacaacagcattgacagtaattccttactatcatgtaatagccagggcatgtttagctttctgcagatgtttcaaaacatcttcttatagtttgtacaaattacgatgcaagaaatccatacatccattgagttgaaaaatgtctaaattttttataatctaaatttttaaataatctgtgacaacctcatctcttccctacaaacatttactttttttctatgctatctatttatgtaagaaactggattgtcttaaaaaatgtcctacatttggaatttggctgatcatatatttattgtgtcattcaacatgttcctgtagttcagtgtttcttggaaagtggaagttatatttaggaatttgcttagttcagtttttggaggggaagcaggagtgctccatagttttttattgcatcacttcaagagttgtataatatctgattttcccacttttagtgatacttagaataatcttcaggtatagttattgttcaccaaattgatcctttataaagtttcccatcagtcttttacgtaatgttttatctactcctgtcatttagttgcctagctatttcattagaagttgcaaggccgggcttggtggctcacacctgtaatcccagcactttgggaggccgaggcaggtggatcacgaggtcaggattttcagaccagcctgaccaacatggtgaaaccttgtctttattgaaaatacaaaaattaaccagccatggtgatgcacacctgtagtcccagctacttgggaggctgaggcaggagaattgcttgaacccaggaggcggaggttgcagtgagctgagtccgcgccattgcactacagcctgggtgacagagtgagacttgtcttaaaaacaaaacaaaacaaaaaagaagttgcaaaatggtgattatttgaattctctcattcattcaacatttatgagttattcttcttctgtaaagaactttgccttataaactacttagaaattatagtaatgacaagataaatgcttgattctttcttttccttatgtatcagtttttagaataatgaattggttctctgcaatctccagtggagactaaggaagttggttttctattttgtaacataattatgcaattatggattttagtatattttatgtgcttcagtccattaagtcattcttcttttgaaactgaaattattccacttagccagtgggagcctggagcctcttcaggctgactcctgtgtccttttgatgtgagctcaatagtctttgatatttttgttgcttttaggcaagatgtcctatgcttatcttgaacatttcctgtaccagacatggaatcaaacatttctcctaggaattctggtttggtctcctctcctctcctctcctctcctctcctctcctctcctctcctctcctctcctcccctcacctcccctctaatcccctctcctctcctcccctcgcctcccctaccctccactcccctcccctcccctcccctccccttcgtcccgtccccttcttttcattttccttttctttttctctccttctcttctcctctcctctcctctcctctcctctcctcccctcccctcccacttcccgtcccgtccccttcttttcattttccttttctttttctctcacttctctctctcactactcctcatggggatcctcataagagtccgacctgccagtcgatggccatgctctcgctacttgcccctgttcgtactgtctgctgactgtgnnnnnnnnnnnnnnnnnnnnctcttctcccctcttctcccttcccctcccctcccctcccctcccctcccctctagatagagtctcactctgttgcccaggcgggagtgcagtggtgtgaactcagctcactgcagctccgcctcccaggttcaagtgattctcctgcctcagcctcccgagtagctgggactacaggcacacgccaccatgcccagctaatttttgtatttttagttgagacggggtttcaccatgttggccaagctggtcttgaactcctggcctcaagtgatccacttgtctcagcctcccagagcactgggattacaggcgtgagccaccgtgcccagccaactctggtttctttaaatggaaaatagcatttaaagaccagaatttgggcctcagggatgctcgttagtgctactgggttattattgcttagaggaggggacagagctatgaaatatatatttttaatggagaggaaaatgaaacaagtttatactaacactccaattaaaatgtaagatttcagcatttttacttcttaaatattatatctttagttctcttttcccttatgttgaaaattgtggttccagatgacgttaacatagtcacttttttgatatgagtgaggggagagactgattgattgaaaacaataccagtagtattacaaataataaggagacttgtggttctttttgttcttaggatatatcccatgaagaattgtcttagtctatttgggctgctctagcagaatacttttaactttatgtatagttaggtattatgtaccgtaatctactgattttttacaggttgctttcaatttttagaaatgttcttctatttgattcaattctgaattgtttcagttatgtaagacattacttgtttccaaagttaaagctacaaaacaaggtgcattcatatgtctggcttccacaccttttccgtaagtaaccatttatttaacattattccttttggcaaatctaaataaatatatgcatatacatacacatgcatatttgtattttcccttccttcctacacaaacagaaacacactctacatatttttctacgtcttgcagtgcttcatggatataaacccatccatggaccaaaaatccatgggctaggagggaagacacacaagataagaaattactgtaatataattgtttgctgatgtcatagaggcagatagattaaatgtcattagacacaaattatggagcagtttttctagggcgggtgagtaggttagggttagcttcagagaaatgacctttaagctggactttaaaggataaccttgaattccaaagttcagctggggatggggatgagaataggagacaggcattccagcaagaagtaaaaccctgagcaaagtgtacagcatgttggtgaaacagcaagtacacatgcaggtgaactatgtttatgaattagaactatatattgtaggctgtgagattttgttgaaaagttctaagttaaatgaatgacacgaccaaagaaatgtgttagaataactggtaacaatgtaaaggatgatgggcagaaagggaaacctgaaggatagagaagaggaggcatactctttaaatgtaagtcgaaaatttagcgtattttgtaagtaattggatgttaagagtgaggaagaaagaggagttgaagatgattccaaagtttctttcatggacatctagatgatggtaatagggattcaggaggagaactaggttacagcaggaagataaagagaacgttagttcaggccaggtgctgtggctcacacctgtaatcccagaactttgggaggctgaggtaggtgcattacttgaggtaaagagtttgagaccagcctgaccaacatggtgaaactccgtctctattaaaaatacaaaaattagctgggcatggtggcacctgttgtcccagtgacttgggaggctgagataggagaatcacttgaacctgggaggcagaggttgtgatgagccgagatcacaccaccccgcttcagcctggatgacaaagtgagtctctgtctcaaaaatgcaaacaaacaaagagaacgctagttcagtttggtccatgttaaatttagatatctttcaaatttttttaaattataaaaataaagatgggatctcactatgttgcccaggctgatcttgaactcctggactcaagtgatcctcccttcttggcctcccagtgtgctgggatcacaggtgtgagccaccacacctggcctaaatttagatatatttatgacacctagatgaagtttttcagtagacatttgaaaacaggagtttggagctcaggaggttagatgactagaaacagtgaatttggaagccattagccttatgtattggcattagttaccatctcatgctacataaaattccctggagacatgtacttgagctgttccctttggaagactagttagagctaggattgcaacattttgatagtcaatattttaacaaatcgaaaggtacctctgttgacttggagcatgcaggttatactaggatctgattagaacctctgttacaggattagcaaaccaagtattgctaataccttggtgtagcatgagaaacattggtactatatgagaaaacttgaataacatttttgaaaggccttttgtaatatatgagattctatttcaaagcctgcctgggtttatgcttagtctagaaatactttttaagaagccataagaaaacaaatccttccttatacattactgtgaatggacttgatatgaaaaggatggcatgttttttatgaagacaacttaaaaagtgtgtagtttacaaaccttgtttaatagcaaaatgaagagtaaaaaaagtgtttttgtaaaagcttatagtctcttctctcattggtattccttgagttaatttataataataaattaataagtattaataatcaatataattaataataatttatcattattaataatagtttaaagatagggtcttgccctgttgcccaggctggagtgcagtggcatgctcatagctcactgcagcctcgaactcctgggttcaagtgatcctcctgcctcagcctctcaacagattaccaggtgcataccaccatgcctggctgattttgtttgtttgttttctgagactgggtctcactctgtcgcccaggctggagtgcagtggcacgatctcggcttactgcaaactctgctttccaggttcaagcgattctcctgcctcagcctcccgaatagctgggactataggcatgcgccaccacacccggctaattttttttttgtattttgagtagaaatgaggtttcaccatgttggccaggctggtcttgaactcctgacctcaggtaatccacctacctctgcctcccaaagtgctgggattatagaggtgagccaccgcgcccggcctatgcctggctgatttttaaattttttgtagcaatggggtcttgctttgctgttcaggctggtctttaagtgcggggattataggtgtgaaccaccatgcctggcctaatctataattattaagtatccatcataggcagagtactattttatgtgtaataaggaggcatagaaaaaaatagttctagttccacattttcaaaactaaagcatatcctgtgataatgtgtttcacgaagaaattgtgttgtctcaaaactctcagggaaaaagtttagtttatttggaagagacagaagaaaatttagtgtactttttgcttgtatgccaagtacagacttggatatatgaagacaggtcatatatgttagtgtgcctttttagattagttgggaagactcttgaattcattgaggtgagcaatagcatttagcattcattttgctaataaaatctaaggttcaggaaatagttttaataaacagggataggaatgtattcaatcatcttttgttcttttaataaatacttattaagtgcttaatatgcgtcagataccgttcattgtactagacacagtattgaacaaaatggcaagaatgcctgccctcatggagcttgttttctagtggagaagacagatagtacaccaactaagtagggtagaatgtgtcatttgttagaaaatgataaagtgcgtaggggaagtgaatatgaaattgaaatatcaggaggtaagctgacaatagagataggaaagacctctctgagaaggttatacttttgtaaaagatcatgcagctatttggggaggagcattccaagtagaaagaatagaaagaacaaaggccctgtggcaggagtatttctgctgtgtttgagaaatagcaaggtggcatatgtgattatagtagaacaaaagagccagtgaaagaaggtaaggtcaaaggtcatgagctgggaacccatccggaggttttgacagaaaaaaatgatgtgatcttatttaagatttaagagaattaccctgctacatagaaatgcagacttaattgtttgagtgtaggagtttgaggctacaatgagccatgattgggccactgcactccaacatgggcaacacagcaagaccttgtctcttgagagagagagagagagagaggaaggaagaaaagagaaaatgcaaacttatattcatataaaattctatacacaattgtttaattgttgatagcagctttctttgtaatagctaagaactggaaacaaccaaaatgtccttcagtaggtgaatggataaggaaactcttgtacatctattccatgctgtactactcagcagtaaaaaggagcaaatggggccaggtgcagtggctcacgcctgtaatcccagcactttggggggctgaggcgggtggagcacgaggtcaggagtttgagaccagcctggccaatatggtgaaaccctgtctctactaaaaatgcaaaaattagccgggtgtggtggcgcacgcctgtagtcccagctacttgggaggctgaggcaggagaatcacttgaacccaggaggtggaggttgcagtgagccaagattgcaccactgcactccatcctgggtgacagtgagactctgcctcaaaaaagaaaaaaaaaaaaaaaaggagcaaggttaatagacacatcaacttggatggatcttaaggacattatggtgactaaaaatatcaggccagtcatggtggtttatgcctgtaatcccaacactttggaaggcctaggcaggaatatcacttgagcccatgagtttgagaccagcttggtcaacttggtgaaaccctacctctaaataattagctaggcatggtggcagatgcttgtagtcctagctgcttgggaggctgaggtgggaggaggtcaaggctgcagtgagccgtgatcttgccactgcagtccagcttgaatgactctttctcaaaaaacaaacaaacaaaaacaagaaaataaaaaagccaatctcaaaaggtcgccgactgtatgattctgtttatatagtgttcttaaaatgatgaaattacataaatgggaaacagattagtggtttctaggagttagggatggtggggcatagaggaacaagcatgactgtgtaggggtagtgcaacggagatctttgtggtggtgaaatatttttgtatctttttttgatacaaaaaattgaacaggggaaaggcaagatccgtttacacatgcaggcatatatgtgagagtactcagtaatgactgagtccgaatagttgtaattgctattgtagtaattgcagttgttgttccacaaatctacacatgtgataaagtgacatagaactatacatacgcattgtacccatgtcaaattctgggttttgatatcgttctataattatataagatttaaccattggcggaaactgggcgaagggtacacgggacctctctgcactgtctttgcaacttcctgtgaatctataattatctcaaaataaaaagtttttaaaaaaagattactaccttggctgctcttttgaggagtaatcctaggaggttattgcagaaatctaggagtgaggtagttgctgttaaatgaggctggtggcactagagtggagtgaaggcaggggtgagaaatagttggattctgaatatgatttgaacgtagagttaatagaatttgctgatggataggatgcagggtgtgagagaaagagaagaatgaaagatgccataaaagtttttggcctggtcaatggaggagcaaagaaaagagatagtaacaagaagcagcaacaagtcaagaagcccggtaagaggtagttggattcttggcaagaaagacaaaatgacaaaccctcttcctctagtcagtggcagccacgcctgggagttagaggacaataggatattaaagtgactgcactcttattaacctgcttagggggagctgagttatcttggcctcgccctgcttttttggaaagaagcgtttgtttgataaacaggaagtcgtttccatgggtgtaggaagaagaaatgatagaactgagtggcaaagcaaagaactactagctgtggttagtttggaattggcagaagttttttcaggtagtcacctaagatgaagatgagcacacatactgccttttcccttttctaggctgggttcattcttcactgaaatgtggtatttctgcctattgcttgtcctgctgtcagggtatgttcattttcagctagtgttttgcatcaactatgagttgtagacttagcagacaaatggagacactgtctgtttagagtggaaaagtgacttattttaagaaatgttggctccgcaccactatcccattagtggcatacctctgacactccattgaagctggcctagggaaggtaagactggcttctgtgtatttttgctctttgaaaggtcagaacctaaatgtaccacaagatattttcttcctgagtaagattgggacaaaattacaaacagtgaattctgaagcaaacttacgtgctggtgctctaatactttagaaaattcaaaatcgatttcctgtacttctaacaatattactcttcgtcgggtatgtaaatctcttagtgtcacttacttcttttcattttgcaaggaagggcagaccaaaaagattaaagaagaccaatgccaagtcatggtcatgggaaagtgagaaagagaatttaaaagtactttttacttttttttactttgttttactttttacttttgaaaagcacttgaaacaggagaaccattttttttccttttaaccgagagtcacctcatccctgtctgggtacatgtttggagtgaaattgtggtcaaagaaaactttaaatttgtcccagacctataatggcaactaaatagataagtagttgattgatggtgaaaaaagcttagtgtgatggacttgactttatgcagcaggtgtctacttgaggtttgtttagattggtgggggtggggagggggcaggactctagctaggggcatggctgcagtgtggatgattgggatgaggatatgggtagtatttgtgtctcagtatttaggagaggtagttcactgaattgcctggaagaagcagaacaactctggagttccttgcaattggagtttatcctgacaaggttcaacgtacattttactttgcgtattgagtggattcaggagccatttggtttcatttgccttctgaaagtactgcagtatttgtaaaaatgctgtgactatgtgttaagtccaggctgggctacagctctggatttcttcactgaaagttaaatatcacatttgaacttgaagaatgtttgctgcctgcctctagagcatatacgaatataaagcagctatttgtcagcaggcagctgaaaggcgattttcagcagggagtgaaaaccactgcaggctgctggcttcctggcacacccactagacctcgtaggtttacagtgaaagcaaaccaatgggagtaggggttggggggataagatgggcaaaaatcagggcggaggctgaggtctgaatgcgattgagccactggaaggagcttgcatgtgaagagcacagtgctcccaaagagaagaaaacttgaaccctaaacacaatggctaggagcaaatatctaatgtgaacactttaaaaaaaaaaagtgatttgttccgtaagtgtatttagagtccaggggaaaaaaaaaagtgatttgtttatcttctttgtatctataactataggggtactgaaggtaactttggggaaagtattatagtttaagctgtactacccagtgcgctgttacagctaccttttaaccagaaccattaacagtgacaatcgatgtgtagaaaatcacctttaagctctgcagaatcctgaaggactttgtgctctattgactagatgtttaagtattccctatatagtattcagtggaccttttcaaaaatgtcttttgcaacatctttgaaagtgaaagttttaacgtatgatactcttaatcagagtacacgtttattcccaaatattctgttctttctttgggtatagcatgcaacagagtttacttgtatttagaagatcaagaggtgggggtattggcaggataaatgatttgtccagggacaactgatgtgtcactgtagagataaaacagaactaggctgcattccagcagcttctggcccgtataacagttttgagaactttccaatcactttaggaaaacaaggtacttagaaatttataaagactttcttaataaaagaaatcacttattttggaaattgtgaaattaatcattctgcagcatttaagaagcactttgatgtgttctggtaattagtatttactgccagacaaatgtctcttgggcattttaattaatgggtagcttggccaaatgagcttctgatggtaaaccttcataagggtttatttttatgtttctcaagaatagctgtctcttcaaagctctttaattagacaaggtttagcaactaaaacatattattagaataattaggccttgggttaagagaaatagggggtcagaggagcaggtactgttagaaaatggcctcttaaaacatagcattctacctctgatggatggccagttctttcacagcttctgttaagttactctccctagtttggacttcgtgttgtttaaagttcatagcagacctcaccggaagcctaaacacacccgagtgggagcttacttatccccacctctgacctcccagggaaagcttgattctagtccttttaactgctaagtggaagacttcttattttctcctttttcttctattaaatcgataatcttggctataacaatgacttgtatttttgagggagatgcttcaaaagccttgtgtgtggcgaacaaaaattacaataattcctttgaggatctttcttaatgatttatattatctacatataagatatgttcttaaagtgactacagtatttgcattccagaatgttatatttcttgtggtcagaatgcagtttgaattattttgcaatctgctctgtagatgggctggcatctaactccccttcttcaaccttctcccctaccatttcttgccacaagcgctcagtcttggcagttattgctagtaaatatgtgctaccctgaacttcctctttgtggtgaaggaaagatacacctgactggtcctgtgagggagtgagatgtcaccaaaacaattgtgtattctaccaaaactgttgataaatcacaatatatttatctatattccctcatttttcactttcctactgtctcaggatgcttaggatggcaaatatgtccttttcccagctagatcagttgattaaaggacagtgctcatgagactattagacatttctaacagaacaactgtatcatagctgacatttctaatcccactagctgtcatgacctatatgtgttgttggtttgataaagaactgagtcaaagatatgtatgtcgttggtttggtataaacctactgctattattagaaagttcttaaagaacctgctaatccatcaaatcatttttgaatattgaggatagcctgctttatagtattatgattttatcacatgtaaattcttttgatataccttagttaacaacatggccaatgaaatgattttatttgagttggtagaaacttcacttggtttttgattgatgttatctgtaaaaattatcattttgtaagaaccatttggtgagccccataaatgcagatataaagatgtaggtatatcgctatgcactccagagaacagttaccgagtaagtgtgtttttatgtcaaatcgaagaactttgagaaagcagaaagatagtaacctaaacagagtgctctgtcgaggagttttctccccctagcagtgacgaatttctgtccaccctttccttaaatgatttaatattggggccttgcttttttacctcctctttaacacaggaaatatttctgatacttatcttcatgtgtgtgtttgctcatgtctgtgcagtcttctgcagtgaggatatgaaaagaaaggtagtgagttctatgacccttgaaaaacaccagaactctcttttcctaatgaaagtacaagtgtgttcttatgcatacttttgtataacaggatttatacttaaaatagtttggatacttattactaatgaattttgatagatgcaaaccaggactatcaatgtgttgttctctcattgctcattttgcctctttaactcactcgagagggccccttgtagccctccttaagtctaccttttgaaattacacaagtgtccaaaatgaaaactgactgtattcttcttcaacacagaccacctggtggcccatggtagaatggcagaaaaggaggcacgtcggaagttcaaacagatcgtcacagctgtctatttttgtcactgtcggaacattgttcatcgtgatttaaaagctgaaaatttacttctggatgccaatctgaatatcaaaatagcaggtgagaactgtactgaggatgtcagatagggacaaaggagcttttccttggggttctataagcaagggattatctgtttccatctcttcagaaagaactattgtgaaagtaaggacaatttaagatgaaaaaaaaaatagcctgaaaattgataaactttaaaagtacttcccctcccctgccctttttttttttttttcgagactgagtctcattgtcgcccaggctggagtgcagtggtgcagtcttgactcactgcagcctccatctcccaggttcaagcgattctcctgcctcagcctcccaagtagctaggattacaggtgcgcatcaccacgcctggctaatttttatacttttagtagagttggggttttgccatgttgggcaggctggtcttgaactcctgacctcaagtgatctgcctgccttggtctcccaaagtgctgggattacaggcgtgagccaccacacccggcctgtttatttttaatgtagtatcagctggaactaggctggggagaaagaagggaaaggtgatatttaaaatactattactttggttaacgggtccttttttacataagaaataaaatatgtaataaagtggaaaggaaaactactaaaattgtataccctctcaccttcacttgagaaggttgatttatgtcactgctgacacagagcatacttattctaaaggctgtaattgtatgataatttaggaaaaatagatcttagagtggcttataggcagtccagctttttgtcttctcaaattttactagtctgcttatctgacagtgccttgagagcacttttcactgccttgatctgttcatgcttaattttagtaaactatcagcattttgcctaatgaatacagactcaccatttactaataaaattaagtgactgcaatctatagagaaactgtaaatatgaaaataagccatttatgtttgccgacactttccggtatagcatcgtgtatccccggtctcccagataaaaggaaggacatctcatatagaaaactaaaatatagctagaatgtaattgtctagaaaaggcaaggtataaagcagttctaaggattttcttccttagtagaggtgggatttgagagtttggatttttatcataggtcaaagttacctaagggtacctttgcagggtcacaattcttctgagagttgcttttgtgtagataagcctgttcacttttacatcctggagcatcacctagctttttatatatctgaaactgacagctacacttttgtttagaactttcatatcatttataagttctttcactcctgcactagcttattacagagtacacaggaattaaaggctttctttatcttatataaaatcatgtttttcctttgctctcatgtcggttttattttctccaaagctctatagatactggtagttcccacaaaggtgtgtggcatggaaaagcctggcaatttcaaaccttcttttgtaattatttgttgtagcttcaattaaattaatactaataatacctactaaacttcacaacccttaaaactgtaataaaagattgattagtgtcttattattactataacaaattaccacaaacttaatgacttggaaaaacacagatttgttagcctgtagttctggaggtcagaagtccaagctgggtctcacagggtgaaagttaaaacagcagcaagggctgttcctcctggaggctctgaaggaaaaatgtgtccttgccttttttagcttctaaaggtcacctgcattctttagctcagccccttccttccttcactccaacctgtggcttccattgtcacatctcctactcctaattccgaccctcctgcttccctcttgcaaggacctttgtcattacattgggctgtctcagataatccaggatcatctctctcccacccccacctttttttgtttttgttttcgagacagggcctcattctgttgcccaggcaggagggcagtggcgtgatctcagctcactgcaacctcaacttcctgagtatctggaactacaggtgcgcgcttctatgcccagctaacttttgtatttttagtagagatggggttttaccatgttggccgtgctggtctcgaactcctggtctccagcgatccacccaccttggcctcccaaagtgctgggagccaccgtgtctgtcctcatctccccattttaagatctttaatcatgttaatacaagtcctttttaccatgtatggtaacacattcacaagtatgggggattgggatatagatgtatttgggggccattattcaacatgccacagatgtcactgtaaggctctttggattatagattagggtagtgaattaaaagaaggccctctggacacgcaccacccactctgcactgaccagcccacctggatagcagaggacacccccagcccccaccaagcattgaagacatagtttatttcctcatatcctttctccttgggtgtagttggggtggggaaggagggaagactggggtcatctccattccttgggctctgtgcccgagtccatggtgcaccactgtgctgcgagctgtggggcctgctgcagtgggagtgtgtggaacaccttgacccaaggggagctttgtcttgtgtgttttgaaaaaggcttaatgaagagaatgttgttcattcttagtagtatagtttgcaattcttaatgacaaatagtaagtttcagtagaaaacaaaacaaaacaaaaagaaggccttctttatattctctagttttattttccgtccgctgacccaagattaaaaattttcttaatgctcccttggttcttgattttgaatttaggatgattttgatttagttaaagaaatttcttttttttctttttttttttttgagatggagtctcacactgttgcccaggctggagtgcagtggcatgatctccgctcactgcaacctctgcctcccccaggttcaagcgattctcctacctcagcctcccgtgtagctgggattacaggcatgcgccaccacgttctgctaattttttgtatttttagcagagacgagttttactatgctggccaggctagtcttgaactcctgacctcaggagttcaagatcctgatccacccgcctcagcctcccaaagtgctgggattataggcgtgagccaccacgcccggctgttaaggaaattttatatcctttagtttttacattgagaaactcagagtaaaaacagagattattgataattgaagttggaaactctactgaaatatttggtaaggagatttttaaagacttttctgttgttgttgttgttaatagttaaaacaaattcaaggagtcacaatgagagtgtctacctgctgatatataattacagactccggggtgctggcagccagccttgggctctctctgtgttaacacatatactttggcaagatttttaagttcattaacccaaagcgtacatttttattatttgttttaagagcaaaacagaaaaataaatgagcacctctagttttgcggcctgctacaatacctaacattagctttgctcatgcagtctttctcttatatgccatcgttactcagtttctcagtcattgcctgaacctcctttcttgcacataaattaaatagaattatcattctcacctcccagttcttttttgaacttaatggactagtgggagaaatgcttctagttgaagccaactagaacatgactaattttggagaggtaggttggatgtttttgacaggataaggtcagataggtaacgaaatcaactttaattctaaaagccaaaagtaactttcagattcctgatcttttcaatggcctcccttttggtaaagtatcttaaatgtcagtaagaagaaactactatatatgaaagaaacatgcaagagagaaaaagggttttttggttttattttaagaagttagtcttggctgggcgcagtggctcatgcctgtaatcccagcactttgggaggccaaggtgggtggatcacctgaggtcaggagtttgagaccagcctggccaacgtggtgaaaaccggtctctacaaaagttcacaaattagctgggcatgatggcgggtgcctgtaatcccagctactcacgaggctgaggcagaagaatcacttgaacccaggaggcagaggttgcagtgagctgagatcacgccattgcactccaacctgggtgagagagcgagactccatctcaaaaaaaaaaaaaaaaaaaaaaaaaagagaaaagaaaaggagaaattagtcgtaagcagctcatctttaaaataatcgtatatgttatagtaccaaaataacttggaactaataaaactcagattaggaagtataaaagattcatgttttctgtatgccattgtttaagtgattttaatgaaaataatcatgcatccagtttcgtgtagaagatgaataaattggtctgtggatatttgtgtttacattaatttatttttacattttgtattaatgtggtgatttacatttgatactgtttgtttgttttgtagagacagaatctcactatgttgcctaggctggtctcaaactcctggcctcaagcgattctcctgccttggcctcataaagtgctgggattataggtgtgagccaccatgcccgccccttcccccttcttttttaagaaactgggttaccttctgttgaccaggctgcagtggcataatcatggctcactgcaacctcagcctcctgggctcaagtgatcctcctgcctcagcctcccaagtagctgggactacaggcatgttccaccacacctcgctaattttaaacattttttgtcactatgttcctcagcctggtctcaaactcttggcctcaaccagtcctccctccttaacctcccaaagtgttagaattatgggcatgagccaccgtgcctggcctacatttgatatttgatactgtaaaaagctagctatcacaactgtccatactagttctcttcgagagaataagtgttccctggatagatagatattagttatagatattataagttataattatagtataagttatatcttcagtcataaatactataagattcagctgagcaaggtggcatgcatctgtagtcccagctagttgagatcaaggctaaggcaggagtcttacttggacttaggagtttgagtctagcctcatagtgataccttgtctactgaaaaaaaaaaaagattgaaccattgttccactgtttatgattttttttgtgcttaattcttatttatgaatttttgttctagttctgtttctagagagaataaagcccaggtgaataactttgttttctttctggttttagaattattagtaacaaatccgtgttcttaatggcagtagcaaacctgtcttctgtagaatttttaaagagatgtttctgtcattagtaatacagaagaagccttgatcattttcagaataaagaattttacgacagggagaggtggctcatgcccgtaatctcagcactttgtgaagccgaagtgggaagatcacttgaggccaggattttgagacctggggcaacatagtgagattccatctcttttttattaagaagaaaaaagaaaaaaaaagaattttatttctaaaggcagttaccaagtctagaactaagaatttgtggaggtaatctagaatcttacttgttaacgaagcctccttgcataatggcacagaagagaaaaaagaagcgtgaaacgtgactccagccctaaagaactgaggctatatgggcagcaaacattagatctttgaaaagttggtaacaccaaaattatgctttgcatatatataatgtacttcacaaagcatttttacatgtatcacctaattttattggcatgcaaatatatcttattaaaaaagtaaaatctcttcatcttctggcacttttaactctccaaaacttctgaatttcttgtaaagagcacccaggcaaggtatagagaaccccaatgctgggaaaagagtaggattcttggcctccgacttttaacttttcttgcctgagatgtgtaaggatccacagaagagcagttgaaggactgacgaggcacaacacagctcactcagcatggagccggcatcgctggatgatagtatccttaacagctaccaaattatagttggatacaatagaagagatgttacaaggcatgtcatgactcattatcacattaattgtacagtctaattagcataggagttcagaggatgatagaagtactgtagtttgtaagattccacaagattgtcagttccacaaggactgtaaccatgtcctgtttattgtcacactcccactggctcatacatgcctgttctgtagcaggtgctccccagctttgtcgaactgaagttcaggcggtactgataaaggacataaatattgtattgaggacatggcatttgaggtgcgtccagtgtcatgtgattggatgatcaggtgtagaggagagaattccagcaagtgttaataaggcacctgtcagttgcagacactgatacaggcacgggggtacagcagtcagtaagataaccccttggaacttatattctaatggggataaatagacagtaaacacaaataagctctcatagggctgtgacaaagataaactcgagtaacatggcagaatgatttgtgcgagaggtactgcttttagccaggatcttcaaaacattccacgcagaaagaagaacaatgcaaaggcctgagagagataaattcaacatagaagaaaggggtagaagaaagtccagcatggctggagataatgaataaaatggggattggaagaagttggggtgagagagatggcaaaggccagttgcacgtggttaggatgtgggatttcatttaggttccagtgggcactgagttggagcagcgtgggcagcagtagaatgcacaaggtctatttgaaaaaaaaaaaaaaagggtgagcagctcagtggaagggaaggctaaaggagaggagtctccccgagaaggcaggagcagtagatgtttatattagattgaaatcatttgaatataagatataaggcttaattaatccaattcagtatggagacggcaaaaagctggaagctgagggaagggaagggcctcctggtaataggaaggccagttaaaggctgtgaatggtaaaatcccgcatgagggtgatggtggcagtaaacatgcaaaggaagaaaacggcaacaaattcaagagagaaagcaagcgagaatttctaggaccagataaccaatcatatgtcttgaccaggaagagggaattttgaaagatatgtttagaaataaagaaatgaaattttcttactgatggattatattaagctatcaaaaaaatggtgttttgaaaatggttaatgtattgctattcgaaagtaattttaatgtccttgtccccaaagattaagtagcaaggtgtctatatttaaaatagattgcctgagaaaaaactgaaatgtagctggcttactccctgaagaaaagttctttcaaatgcttagacgttataagaatgttctgaaaattgtggaaacattttttttaaacctaaggaagttggaaacttttgtctttaaatgtcgactcccagaatggtctccatgagatagtttccactctcgtgttattgttttagttggcaatcagtagacagcaaagatcagaaatgcaactatagaaaggccaatatcctggaaagaattttcagagcatggatttaaggtaccatggaaaattttgaccttaatgcagtgagagctagaccattttattattttttagggagaaattaaaacatttcctaactcaattgacctttcacccttagtatgaatatactgagataccatcatatagaaaagaaaggttggaaaccttggatttttgagtacccttccacagtgtgttgactgacagtgcctctgactggtcacaggaagtagttatgcaatactcattatatcaatctaaattgtatttcatgattctaatgccctctttttaggctatcattcattgcacctcccaggttgacatgtccagtgaattgagaccagagaggcctttgtgtttgtcctgaattcataatagagtctaggaattttaatagctagacctgtgttcttgccctgaaatggcatatgaccattaccaagaagcggctctaaataaccttcctgcacgttgacccttgggaaaagaaaatttgaaatattatctctcttgaatcctattcctgagactagaactttacaaatttgtattctacttaatgtcatatctatattttttaatattaagattattaacttagtttaacacagaaaaaacgttgatgttccaggaaggtgcaccctatttagcctacggtttctcgtatatcttggaacactgaagtgtaacacctgaggctgtgtaaacagaggccagcctgagaagctgagaatcaagaatttgatgctcaaccatagattcctcttactcacacttctagtttgtgcagagtgacttctctattacttttcctcagcctcaaggattttcatgccattatctattaattgcacgtcacttattttggggataattagaaaaagggggaatgagaggttgggaatagaaaaagggagagaagcaaagggcagaaaagaaatggaagcttttgctttgaggtcttgtgggggtgggggtggaaaaaaaagtgtaggagaagcctgagcccaaaagcttgcctcctccctctacagggaaagggagttgagcggagtgtaagagggtggatggcatgcgcttctgacctaccaaagcatctggaaatttcagactgctctttgtctctgagactgtgttgggcacagcattgaataaagtgtggatcaataagtatgtgaagtgctggatatgttaattcactggatttaatcattcctcagtgtatacatgtatcataacatgtacgatgtaccctgtaaatatatacaactattgtaatttgcccattaaaataaaacaaaatataaataaaacatgagcagtgatgattaaaagccaaagtttcatcttaatctgtataatatctagaacaaagaaaaataagtttatcggcattttattgaagctgcagaaaatgacagctttgaaaaatctcaagcaacgtatggtttaaggaaattaggtgtacacttaagctatagtttgtttgtttctccctttcctttcctttcctttcctttcctttcctttcctttcctttccttccttcttcttccttctttccttcctctcttgtcctctccttttctttctttcgttctttctctctcgctctctttcctctctctctctctctctttcccttcctcctttccttccttgcctccctccctcccttcctgtcgctcagactggagtgcagtggtgcagtcatagctcactgtaaccttgaactcatgggctcaggggatcctcccacctcagcctcccaagtagctgggactacaggtgttttgccaccatgcctggcgaatttttaaattttttgtggagatgggactcgttttgctgctcaggctggtcctgaacttttgagctcaagagatcttctcaccccacctacctaactgttgggattacaagcatgagctactgtgcccagcctcttacctgtagtttctagtttaagaagttttagaagaacattgatattctatccatttagagtagtgttttacttttattagtggctatagaaactataagaactatagaaaagttatagaaacttacagttcttataggaactctaagaacgtttatataagtctgcccaaggtcatgtgtcctcatgaggatcgtaagctcctcaaatgcaagttgatgttgggaagggactaacgaatcacccagagtgctccttcactctgattctgagggagtctttattgtgttgtgtgaagcgtgttggaagccaggtgtggtcgcacgcacctgtagtcccagctactcaagaggctgagatgggagggtcgcttgagccgcagaggttgaagctgcagtaagctatgattacaccattgctctctagcctaggcgacagagcgagaccctgtctcttaaaaaaaacaataaaattttttactttttgtagagatgaggtctcgctctgtcgcctagtttggtcttgaactcctgagctcaagtgatcttcctgcctcagcctcccaaagtgctaggattataggcatgagacactgtgcctgacctaaaaaaaaaatttttttttttttttggctcacacctgtaatcctagcactttgggaggccgaggcgggcggatcacgaggtcaggagatcgagaccatcctggctaacacggtgaaaccccgtctctactaaaaatacaaaaaattagccgggcgtggtggcaggcacctgtagtcccagctactcaggaggctgaggcaggagaatggcgtgaacccgggaggcaaagcttgcagtgagctgagattgcgccactgcactccagcctgggcgacagagcaagactctgtctcaaaaaaaaaaaaaaaatttgatgtgatattatagaaatttaaaattaaagcaatgtcaaaaagagtgaggctgactttttaggcaagcctttgcaaggtggcagaatattagtaaaggtccccattatatcagaatctggttgtcatttatgagttctgaaatataccttatcagttctcttaaaatcataagagagtgagtataatatttgtatcagttttcttagcatcaaaaagtacagtttgctagtggtaggcatgggtatttcatctagtctttttaaaatatcctgatttgagtggtctttggctcgtctttgcggaggttatacacagaccatccttaatttaccatctcaagtagtatacaggatcttttcccagccagtgacttctgaatcctcagagattttcagtgttccaagagattcatgtcatacaaagtgataatgacttttctattttttagaagttaataaatgaaataattacttaggtctttccgcccttcttaaatggaatagtttgagagcctctgagtataaatcgagtctacctgctggcagggcgctaatgagcatgcttatgacttggtcattccatttattgttcaagtagttggttatcataatagctttgaccagggtacagtttttcattgtattttattaagtttacatctattatggatcactggattatataaagcataaagaacactaatgttgaaattcaaattgatgaggataaaaatgataattctgtaatgcctcaagacaaccttcaccaaattcatgatttgtctttgtttggccatggttcttacacagcacatcaaattgtttctagggcctcaagaaacaaagtttaaaaatgttacattacatacatacacacaaaatatgtatataccacatgtatatacattttttacacacatatccgtatctatatctatctatctatattatatccagtttgatttattgggaataaagactatctacattcatagtatattatttgcaaagaagtgctaataagtaatgacccaatatttgttaatccatttcattatttaaaagcaaggcatgaaaataattcatttaatcaagtctggtttttaggttcaaacatgtaagtgttccaaatcctaggtcatgaaaagtattcatctgttttgtgtattataatctcagtatatttgtggcttccaaagccaggtgccgtggttcatgcttgtaatcccagcactttgggaggccaaggcgggaggatccctgcataccagcctgggcaacataataagaccccatctctatcccaccgcctgcccccccgccccatcaaaaagaaaaaatacacatacacacacacacacacacacacacacacacacacacatatatggcttcctactaaacatgatatatcaattttaaataaatactttttcttgaataattgaaataaatagtgtgggtcacttgtatgatgggataatatgaatttgtcttaaaattcatagtgaacttttaaattaatttttaatgtactaatgtaaaataaaatgtcttttagctaaagtctcttctgtatcataaatcatagaaaaatgacaaaattatttttaaaatttctttcccgggaggtttttaagataatacattcctttgaaaggagtttgtgagtcagaaaagctggaaaataaaaaggtaactgtactgatttctttacattctaatccaagtataccatggttttcttgatcagattgagtgagtctctgaactgttgatagaaccttcttcaggaaagccccatttctctagaatataccaattgcccctctggaacttttccttaaaactcatccagtggttataattatatagttacatgtgtgcttgtttcatgtgtatctcccccactggactaatctgctacatgagggcagggaccatgtctgtcttgttcaccttgtactgagaatacatttgtggtccatcaaaaaattgaggaggcaggccgggcgtggtggctcatgcttgtaatcccagcactttgggacctgggcggattacctgaggtcaggagttcgagaccagcctggccaacatggtgaaaccttgtctctactaaaaatacaaaaatcagccaggtgtggtggcacatgcctgtagtcccagctacttgggaggctgaaacaggagaattgcttgaacccaggaggtggaggctgcagtgacccaaaatggtggcattgcactctagcctgggcgacagagtgagactccatctcaaaaaaaaaaaaaaaaaaaattgagaaggggagtactttattcccattatcatattttcacatcacctttcagttgggttacttttcagatgtctgctctcatttgaagtttttttttgtttgtttgtttcctattagctttaatctaagatagtattttgttacctactcttaatttctaggtaacaccttagagcttcttaagtgacaatcctatcttcttttctctaaaagtaggcttctgcttatcagaccatatgtcttagtttttaatttggaaaaaggtttttgttttgtttttttgtttgtggttttttgtttatttgtttgtttttttgagacacagtctcactgtgtcacccaggctggagtgcagtggcccgatctctgcccactgcaacctctgcctcctgggttcaagtgattcaagagaatttaaggggacactgattcatcatgttctataaaaggcacactaaaattttgtataccatgctcacctatcattattagaaacttacctgattaaatgattaggcttttattgttcttgttgatattctttacaatcatgactatgatatactcattaatgtttttaagaattccgatgagtactgtttgcatgtgttgtagaaagtgtctcattataatcctttcctttatacatctagtcagtactgagtttgatgcaaagatcctatattgaggaggtgtttggggatttatatgagaagggttggatgttgctatctaaaataaatagagtggagaagactggtttattacttcatttaaaatagctgagttcagctattgtacctgctaaggtgttttgggataaaaatacataagtcactcattggaaatgccaatataatgctgatccaaatctccccccaaataagatgattacttgattttttttttttccttgaaggaattttctcttgtgtatatatgctaaggctgtgagtcaggagtttttggcattacttctctattagctcctagtgaggaagttcagccaggggttgaagtgattactaaatcctgaggacttcccaatatctgtttttaagagtgaactaatattgtgacttctgagaactttgaaactcatcctttgtcactaccacaattctgagatccacacacttgacttttgttttgttcaatttcaaataaagcccttaggtcatatggtttggccagtgacattatataggaaaagcagatttaattccttattagcgtcatgttccattttaatagtcaggagaacattctaaatcctatttatatactgttcttacaccagtcttgatctttggttctttgcatcatttctagcagcaacatttctaattattagaaatttctaataattggaaattaatcaaggacctaattatttctgtcttcatctttgggtctctaattgcaaatgcagtattgggattgtgaatcctcagaagcttttagctttgaaaacatgaaggatcttgtcacagtgatttttggtgaggttgttcatttagggtaagtaaatatcttcccacttcactttttcccctctgctccctgcttccaagctgtttacttatacagcaaggaagtgaagcacaagttacccttggaaagcagggttgtccgtcgctcaaagctgtactgtattgccttagagacactgagaacactagtactggctggaaagttgtgcctaatctgtttacatctgctttggattgttctttggttagccaaaaaagaagtcaagttcattgctctaaagtggtagaccaaataagaaaattgcctgttgcagttgccctgatttataaattaatgccgcccgttttgctcttttcccttaccacatagacatatccagttgatgatatacttatttttagggatatcagttatcactaccttatatatccccaggctcctgatctcacctccaacaaagaattccaagtctcaaaattgatagtaagctctggtatttaagccttcctagaagacagtcatatggttcaaattaaagtctcctgctctgtattaagagaaagggatttaagttgccatttcagcctgcggacaaatgctaaccaactagggtgttgggggttggaaagcaacttaacaaattatattgagagccacttgcgagtggagaaataaatgaccatggccacatgaagagaccaacttcgctccactcatatggcttctgttgtgtaggtgtgcgtatccatcttaaccagcttcttctgtttctccctgttcttccgtaactctttagaatattcatcattttaatgttgactctgtaggtcatacatctttcccattgccagtaaataagcagtaagggatatcaagtattttatcggcatcagtacctgagaattacataaaactaactgctcagtgtttttgttcttattgttcaagatgatgtcttaaagtctttatacttaaaataaaaattttagttatagaataatgtaagcatactatagaaaatttaaacagcaacaaaaccgttttaaatattcaagctgcaatcccacctctgaaaccattgttaacattttgaatgcattttcttttgtctttttactatgcatgtttttcatacttataatcagtgtatttacaattttatatttcccatgttgctccatatagtcatcattttttttttttgagacagagtctggctctgtcttgcccaggctggagttcagtgccaccatctcgggtcactgcagcctccgcctcccgggttcaagcagttctcctgtctcagcctcccaagtagctgggactacaggcatgtgccaccacacccagctaattttgtatttttagtagagatggtgtttcaccgtgttgaccaggctggtctcgaactcctgacctcaggtgatacacctgcctcggcctcccaaagtgctgggattacaggcatgagccactgcacctggcctcatcatttttaatgagtgcacatcaagtagatgtaccataatttacctgatctaccccatattgtttttgttttgttttgttttgttttaaaagacagggtttcgctctgtcacccaggttggagtgcagtggcatgatcatggttcactgcaccttgaactcctgggctccagggatcctctggcctcagcctcccaagtagctggaactacaggtgtgcgccgcttcaccaggcaccatattgttttatgatctcaccaattcttggtattagcacaatcctcactttttctttggcatttattactgcattctaaaacttcaaagtgtgtttacttaaccttttgaacgtacagggaatcctttctttgccttaagtttctgtgttttttttgttgttgttgttcttgtttttcacttacattgaagttgtcattcttctggattttttttcctttatatttcaccagcatttggcctgctagcactcttcatcttgagccatgtgaactaaacttcagcttatggtagtctagtttactttatgtcttctggaatccagctagtggtaatgatcccaggccttgtccctttctctttcccaggctgacttgagctggagcagtacagcactccggtgttccttagagcgatatgagctctggaatggtgaaagaagattgttaccaaatacaaagtgcctgtggttttggggagatgatgaggctctgtgtgtttactggctgcttacctttgggatttgaataacttaaagattataatcagaaaaaaaatagattcttaaaaaaaaatggggagagttaagattatctgaaagattactaaaactatgtcaactttcagttatacaggtttttaaaaatattatctaggtttttttttcttcttttctggctatgttttttcatttgatagtttacatattgaaggaaaagaaggaaaacctaattttttttagtgttcttcgttaacagctcttgttagaactaaggaagcaagtgatattatagacaaaaatgaatttttaaattatatgtagtgtatactagctttgtctcttactaatatgggttactgagaaatagttattagtgtgggagtaatactaatattttcaatcatgtgactaataagcatatcactcacacctaattgccattttagcattaatgattatacctatcactaaaatatttactcttcctttaaaattatatttaatgataactggaaacttcatcattgtatatattcttcctagattacagtttttcttcatatatgaaaattgctattttcaacaaaaactttagttgagatctctgtcttaccaagtagttcccagttcctacactctgagttctgatacattcatttcctatttcaaactgtatcgctcttttcttccctttctcccaccctctctgttcttagttagtcagtgagttgttttaagatatttattgagtgctttctcttcctgtcagcactgtgctaggccctaggaaatcagtggtgagaaaaacctctgccctcaaaagccctaatgattgtggagcttagatcccagagcagtggttccaagtggcgagaaatagcagtggaggaggaaaaggagctattcttgtctcttttgtctttcatttattatgaaatattatgtttatacataaattttctttaagcatctgtgtatactttagtgaatcactagaagcaaatacctgtgtagtaattggcactcaggtcaaaaaactagaaaatttcatcagccaggctgtacacctcatcacaaccatatccttcccccaagagaaaaaaaattttttttgtacttttgtgttaatcacttatgtgctctactttataggtgtttttttttttcttttagtagttttgccactgatgtaatgcattacttaggagttttgctccaagggatgccatttatactgaatataatgtgtagtgggtccatccttaaacaatatagttttgcttgttttgaatgatacatgaatagaatcatattgattatattattttttgtctgtttcatccaacagtctgtgagatttatccatgttgtttgtatagctgcgatttattcatttttatttctatatagtattccatgatatgaatataccacaagttatttttccattgtacctattaatagctattttaaaagcagaagcccctattgctttcagtttggggcacttactaacagctgcaacgaacattcctaaacatttatcctggtatactcttaaacattagtgtgtattcttaaacatttaagagtgtaaactgagaagtgaaattgctgggtcatatggtgtgtgtttttaggttttatttggtaatgctgaactgtttccagtaggtgtgagagttccacttgctccatgtcttctccagtgcttgttattatctactcttaaatttttgcccatctggcaactgtgtaatgattatcttgttgtggttttaatttttactgtttctctttaataatgagattgagcttctttttgtgtctcttggcctttttttgtcaattgtcaatagtcttttgctcatttttctactggattctctattggtcttattgatttataggagtttgtttctttttgatagtctggatacaagtcctttgttttttttgtttgtttgttttttgttttttgatgattgattggttggttggttgttgagatagggtctcactccatcacccaggctgcagtgcagtggcgtgatcacagcccacagcagtctcggcttcctaggctcaggcaatcctcttgcctcagcctctcgagtagctgggaccacaggcatacaccaccatgcctggctaatttatatttagtttttgtgaagacgaggtctccctgtatttgcccaggctggtcttaaactactgagctcaagcaatcctcctgtcttggcctcccagaatgctgggattacaggagtaagccaccacgtccagccgagtcctttattttataagttacaaatatcctccctcactttgtggtttctcactttctgtttaacgtgtgtataaattttggcataattctaatgtaacgaagtttaccacttttccctttatgattagcactttttgtttcttgtttgagaaattcttccatcccctgaggccgtaaagatacctgcttttttttttttttttaaataaaaacgtgatagttttacctttcacattagggctataatccacctggaattaatttggggatagagtgtgaggatggcagcctctgtaatttttttccatatgaataacgagttgttcctgtgccactttttgagaaatttatccttttcccattgatatacagtgtctaccattcttttctatgcatgtttttaaaagaaacttgacgcagtattcctgaagcattatgtgtctttgggaattaacataagcagagcaaagggtggcagtcaataataaaatgaaaaacagtaaactgtaataactaaggaatttgcaagttttttgtttttttgagacagtgttttgctcttgtcacccaggctagagtgcagggtgcaatttcgactctggtgcaaccctccgcctcctgggttcaagcaattctcctgcctcagcctcccgagtagctgggatttcaggcacctgccaccacacctggctaattttttatttttagtagagacggggttttgccatgttggccaggctggtcttaaactcctgacctcaagtgatccgccagccttggcctcccaaagttctgggattacaggtgtgagccactgtgcctggcaaatttttaaatttcaataaaaataattatgggatgtacgtgaacttaaatataaacacatacatgatgctgaaagcacaatgtggggctggattttgagggcactgagaactggcgttataggctgcatctgattcatactaatttttctttaacctttatacttgggaatgttacttttgaacctcacgtctcaggcataaaacaaaaataatgctcatctcaatgaggtaataaatacaaggtgctgtagcgcagcactcaacagaaggtcctttgaaaaacaactgtttaatactgcaaagtgcagcacaaataggaaaactgttgcactggagagatgagtcaaggacagtccagttccaagtctttctgggatacatggctccctccagggctcttgccactcacctgcatggccacgacgttcgtttctaagtactctgaatatatttgtatataacttaggattagtatctgttggttgtcatcaatcttggtaagaaatgcctaattttattcacagcttgacattgtagataactctgaatggatctggattatatttgtagtccatttctgtgatgtagcctgtctttacaacaaataaacaaaaattctgaggggaaaatgataccatttctcatcgagaataattatgtcatcatttgttttccctcagatcaaagttacataacacttggatgagattacatggatgctgtaagccacctttttctgcttttctgctctctcggcttccttgttacattttcctgactttcttcctttagccgcgctttctctctcctttttgctgcatcctctttctgttctcgcacctagggaataggaagtacctctgggtgttttcgaagccttaattctcatccttcccttttctctactttttctttcaaaaatattttatccttttactactataattcagtttctcagaatatcttcacttaaatttctgatcaccttctcaaactcaggacataaagaaaaagtaattttttttcttcccaaaccaacttctgctttccttaagtctgtcatctgctcagggccatattctctacttctccttctttttcatcccatatattctgtttgttatcaagtactgtccgctcctttcagaacatcttttgaattgtttttttcattttcaatatctcatctgatcacagccttcaatattcacctcacacctaacctaatcttgctttctagtttattttaccacttcacctgcctgctcagaagtcctagcaactccttattgcctgtaagtgtggctctcaaacctcttcagaaagaactgtgttttactggtacctttatattcacaccaaaagcataagtgacaaaaggaaatacagataagttggacctcatcaacatttaaaacttttgtgcatcaaaggacatcatcaagataatgaaagtccacagaatgggagaaaatatttgcaaatcatatatctaataagagatttgtatccagaatgtataaagaacactcacaactcaataataaaaagataaccaattttaaactgcacaaaagatttgaatagacatttctccaaagcagatatacaaatggctgaaaagcacatgaaaagatgctcaatattattagccatcagggaaatataaatgaaaaccactgtaagatatcatttcacatccactgggacagctgaattgacaataataagtaataataataaagacaataagtgttggcaaagatgtggagaaattggaatccttgtacgttgctggtagggatgtataatggtacggccactttggatagcagtttggatacttcctaaaaagttaagcagagttaccatatgacccagcagttccactcccaggtatatatccaagagaaatgaaaccatatggccacacagaaactcacataaatgttcatagcagcattatttttagtcgctgcaaagtggaaacaacctgaatgttcaacagatgatgaatggataaataaaatgtggaatgtccataccatggatgttattcagcagtaaaatagactcaagtgctgacataggcaacaacatggatgaacctccaaaatattatgctcagtgaaagaagccagacactaaagcttatatattgtatgattccatttatgtgaaatgtccaaaattgacaagtctcatagagacagaaagtagaaagcctagggctgggccattggtgaaagacttgaagggtgttggggagtaactcctaattagcacagggtttctttttggggtgatgaaaatgttctaaaatttcttctttggttttttcactgccttttccttacaaggtgaaaaatgttctaaaactgattgtggtcatcgtcgcacaactctgtgaatgcgctaaaagccgctgggcattacactttcaatgcgtgaattgtatgggatatggaatacaagaaatatgttatggccaggtgcagcggctcatgcctgtaatcccagcgcttcggaaggccgaggtgggaggatcatgtgagctcaggagttcgagaccagcctgggcaacacagcaagaccctgtctctattttattctatgttttaaaatttaaaaattaaaaagaaaaaagaataacattttataagaaaatattttatgagagacttataaaagagacattaagaatatgaagtaatatatttcgtattccttatctcaataatgctgtagggaaaaaacaattgaaataaaagcagtaaatgagtggagcatggagagtgtgtcatgagccaaaggttataataaattcataatcaagtttttttgtatctgaagtctaataaaatttttaaatgtggaggaaaaaaaaaggaaagaaaaaatagtaatggttcacaggatgaagtccaaggtcttcattctgtcatttgaagctgtattttatctggcatgatgctgctgtgcactctttatttcttgccatatgcccctacaaaccctttattgtacccagggcagtgtcttgcttgtcacttgaacttagcgagttaattctaagtgttctgcccttgctcgtgctccctcctgactgccattcagagcaccctttccaccttccttcattgcctctccagatcctggccattcaaccaagttctgcttcctttgagcctttccctagaactatgttttatgcctttggtttgttagaagatctaacacattgctattcccattggaagagttccataaatacatgttacataaagagtgaaggaaatggaggaacttacttagagacttataaaagagacattaagaataggaagctttagtaaataatgaaagatattgtgaattagagtagctccagagccaaaataagatgaaaaagcctattaaatagaaatggttttctaggttcaagttcagatcaaacttaagctctaaagcttttcttggcttggtgcagtggctgttgcttgtaatcccagcacttacgaaggcctagtcaggaggatcgcttgagcctaggagtttgagaccagcctggacaacatagcaagacccccatcactacaaaaaaattttttttaaatagctaggcatggtggtgtttgcctgaagtcccagctacttaggaggctgaggcaggaagatggcttgagcccaggaggtaaaggcttcagtgaactatgattgtgccactgcactcccatctgggaaacagagcaagactccatctccaaaaaaaaagtttttctttacctttttctttggcatttctgacttaagccagtgagaattcttcctcattcttttttactcattgcttgaatttgtgttatgagaatttttttcctccaacttggatgatctttcaattttttccagttgtctatacatgtagataactgaaaacagcaaagctcttagtgattctgttccatgtctatctgttccccacctccatttcctaccacacaccccagcattcccctagtacatcactaaactatcaacagaacctaaaatagactagtttgttttaactgtatttttctttccagtcctcttaaaatgtgcagcaaaatgtccccaaaggcaagcagctaagagaatgaagaggaggtattctcccatcacagttactcagtcccagaagtattgattggaaggcactgaattttcaaaatgacttccagatttagtacatggtaataatttgaggctttcccacacggataatttaaatgttcagaaaataagttatgttatagctgaatgggcagcaaattagacagaattttaacttacaagatgcatagcaatagtgaagattaatgtgaaatactagtaaagagccactggtagggaagagaagacagcgatatgctttcaatgaaaccgtcaatttataataatatgtatattgaaaagggagagtggatcagatcctgttaggtttggtacgttaaagaaagaattaggataccgcaggctcagtaattaaaggaatctgcccataattggggggtaaaaggtgtcttgtaggcagggaatagcaagattttgcttgaatgtacaccttagagttgggagtaacaatacttggaatgattatagaagacctctcgacaggtttctgagactagaggattttgtttggtgcataataggagatgagagcaagccagtagtatttggttgttgttgaatcttacagaaatcttgcatttggttattgggtctagctgttgaagccagctgtttggatgtaacatagtggaagcaggtgcttctgcagatgtggctctctctagttgtctggctgtaatatatcattcattctcatacactcatttctcatataaaatccttataactattagcagtctaagcctgcagacattgctgaagctggttccctttgatattgttttctttgtaacagtttcctgtttggtagataaaataacaagctcacactattaggtttgtgccttcacctccctggcaaagtaacatgctagaaaggttactaaacattagtggttcaaaatgagaagtctgtacattttatctgcttataggcgaatttaaactcaactggtttaaattcattgcttagcctgttgcatgctccattgaaaacacaaacaaaaaactccatgattcttctagccatgattcttctagagtttgttatccagtcattccagtgccagaatccatcaggcagaacagaatcattcgcatttctcctctgcactggagagaagaggaaggctgatcatggaaaaggacctggtgaaggttttttgcaaatctaaggatcttttttctgtcttttatttttgcaaacctaaggatcttccttctggataattcccagagacgtcaactttgctgaatctcagttgttgggatttttagcaacctgttcccactctcctaagaaaaaaatcttaatagtgaccagtgtgtgcagactttaatttgtaagtgaaagttacggtgtttcaaaagttgcaggttagttggtagagcattaaatgcagttttgttcatagtcaacattaagtgcccactgtgttaaacactgttagatactgtgaaagagagaagaataaggtaaggaactagagagagagggtagatctttacaagagaggatgtttttcaggagctagaagaatacattatttatgtattcaaataataaagggaaagaaagtacagacagagtagataggggacatttcttgtaggggatccaggaggacttcacagaagaagtattatttatttccattaatgaatgagagtattcatcttctcatagaagaagctataatgattctatttgtggtcctgactgccacaccccttatgatcattaagttaattttagaaccttgggagggacagctaggaggcagaggctctcgttgctggccagctgccattgtcagtttgagaagtctccagtagtcaggaggtgacaagaggattggcccagttattttattgcagtttaatttcgtgaccctttcttgagtctctgctatgtattagaaccactgtgtagagactaggataaataaaacggtatctcctccatttactaattaatggagggtataaacacacaatacaattaagtataatataaggcagaggctgggcgcagtggcttacgcctgtaatcccagcactttgggaggccgaggtgggctgatcacctgatgtcgggagttcgagaccagcctgaccaacatggagaaaccccgtctctactaaaaatacaaaaattagccaggcatggtgatgcatgcctgtaatcccagctacctgggaggctgaggcaggagaatctcttgaacctgggaggtggaggttgcggtgagccaagatcgcaccactgcactccagcctaggcaacaagagtgaaactctgtctcaaaaaaaaaaaataaataaataatatatatgtatatgtatatgacagaacagtaatgggatgtagaggcgtaaacaaaaggctgtggaagcacggaggaggaagccattgacatggtgttttctggtggaaatcagttaagccttcatacaggaagtaatatttgactgggccttgaaaatgagtgatactttaaagatggaaaagaaaggaaaaggcatggtacagagaggaaatagcatgtggaaggcatgtaaacacaggatgtgaatagtctagtgatgctagcatggccagggataaattggaaacataggatggagctgggttgtgaagggccttaaatgacaatgctgagatgaagactcttctgtaagtagaagggaggcagcccatgttttttgagcgaggaggtaacaggatctggtttgtgtaactttgtgctatgaatggatagcttaggggaaaatgaaataggaagtaagcaatagcatcagtcaagctagggatgataagagtatgaactgcagtggtagaaatggaaatagaaaagaggaggtggagtcaagacacatggagttgaagcagtaagagttttattaccaggttgaaatgggaaacgagggagaaaggacttgaagatgactccagtgtttctagtaacacaggtggtgatgtcactaatgagggtaaaagcactgaaagcgcaggtatgactttggaaaatggtgggtttgaggtgtttcttcccaagcaagtattggggattcatgccaagaacttaagagtggtaccagggccagacatataaatttggggtatttatatcaaatgctggtagaagtagcgagattaaaagagttagccctgagaaaacatagagcaaggagaggcagttaaaatcagcagagcctgctgaaaaacaccttctgtagaaggtagaaagaaggaaagcaaatagcaaaaggagagttgtcaacaagagtaaaactggaaaagagagggacgggtttcagagagtaggtgggtgcttaacattttcagatgctgtgatttcagggagcatggtgtccctggggcacgagggatttctagcctgtcacatgggtacacatacataaataaaagcatttctacaccagagactcaatcctttggccagccatccttgctcattgtcttagtgtagctcctgaagactcatccctgctacctcccatctgctgcgtcttgtagcagtaggagagggagagaagaagggaggaaaattgaagcacaaggagagttaaaattaaaatgtaagcattcttgcttcagtttgtaaataagttgcatattcttccttttgaataaactacttaattataataatgtcactttgtctaatttttaaatggtcatagatgtgtttgtcataagaagtaaatataacataaaaattctgggtccaagccaaaagaacaaagctggaggcatcacactacctgacttcgaactatactacaaggctacagtaaccaaaacagcatggtactggtaccaaaacagagatatagatcaatggaacagaacagagccctcagaaataacgctgcatatctacaactatctgatctttgacaaacctgagaaaaacaagcaatggggaaaggattccctatttaataaatggtgctgggaaaactggctagccatatgtagaaagctgaaactggatcccttccttacaccttacacaaaaatcaattcacgatggattaaagacctaaaccttagacctaaaaccataaaaaccctagaagaaaacctaggcattaccattcaggacataggcatgggcaaggacttcatgtctaaaacaccaaaagcaatggcaacaaaagccaaaattgacaagtgggatctaattaaactaaagagcttctgcacagcaaaagaaactaccattgagagtgaacaggcaacctacaaaatgggagaaaattttcgcaacctactcatctgacaaagggctaatatccagaatctacaatgaactcaaacaaatttacaagaaaaaaacaacaccatcaaaaagtgggcaaaggacatgaacagacacttctcaaaagaagacatttatgcagccaaaaaacacatgaaaaaatgctcaccatcactggccatcagagaaatgcaaatcaaaaccacaatgagataccatctcacaccagttagaatggcaatcattaaaaagtcaggaaacaacaggtgctggagaggatgtggagaaataggaacacttttacactgttggtgggactgtaaactagttccaccattgtggaagtcagtgtggtgattcctcagggatctagaactagaaataccatttgacccagccatcccattactgggtatatacccaaaggactataaatcatgttgctataaagacacatgcacacgtatgtttattgcggcactattcacaatagcaaagacttggaaccaacccaaatgtccaacaatgatagactggattaagaaaatgtgtcacatatacaccatggaatactatgcagccatagaaaatgatgagttcatgtcctttgtagggacatggatgaaattggaaatcatcattctcagtaaactatcgcaagaacaaaaaaccaaacatcgcatgttctcactcataggtgggaattgaacaatgagaacacatggacacaggaaggggaacatcacactctggggactgttgtggggtggggggacgggggagggatagcattgggagatatacctaatgctagatgacgagttagtgggtgcagcgcaccagcatggcacatgtatacatatgtaactaacctgcacattgtgcacatgtaccctaaaacttaaagtataataaaaaaaaaaattctgggtccagctgagtaggcttacatgtgtttcctgattctaatgtggtcttaacatcatccagtttcatttgcattcttttttttttttggagacggagtcttgctctgtcgcccaggctggagtgcagtggcgccatcttggctccctgtaatctctgcctcccaggttcaagcaattcccctgcctcagcctcccgagtacctgggactacaggcgcacgccaccacgcccggctaattttttgtatgttggtggagaggaggtttcaacatgttggtcagaatgatctcctgacctcgtgatccgcccacctcggcctcacaaagtgatgggattacaggcatgagccactgcccccaggcccatttgcattcttaaaggaacaagtaccactcgctttattctgcctaggtttatgaagggagcagtactatttttgctgacataaactgatcatgtttatatttcagctcatctatatctctgtttcactattattgttttaagtgtctggctatgtggtttctaaatgttctctttttgcatttaatattcagacaatgatttggaatctttagtgactagagactagtgtttgctcagttataataaaaggttacaataatacgaattatgtccatttgcctttctagattttggtttcagtaacctcttcactcctgggcagctgctgaagacctggtgtggcagccctccctatgctgcacctgaactctttgaaggaaaagaatatgatgggcccaaagtggacatctgggtaagtaactgccttctcttataccccacagcattagctacccttggttgatgacagctattcgcatcctgaaggatacataatgatgcaacatgaattgagatcctggtcacctgttctttcaagtcccaattcctgtgcaaagccttttttttttttttttttgaaacagagtctcactctgtcgcccaggctggagagcagcaggatgatcttggcacactgcaacctccacctcccaggttcaagtgattctcctgcctcagcctcacaagtagttgggattacaggcacaagccaccacacttggctaattttttgtatttttaatagagacagggtttcaccatgttggccaggctggtctcaaactcctgacctcaggtgatcctcccgccttggcctcccaaaatgctgggattataggcatgagccactgcacccggcctactcgtgcaaaatctttcctccaatacttaccttgtggactgagccacatatttcaaatttcccctttgcatttgcaaaagaagcccaagggccagcttggatgggggccgttgccaagaagagagattatttctactgtggccacttaccttatccccagagaatgagtactgagaaaaattcaggatgttaccctaaattaatgcctagaagcaaagaagattgttaactgttctaagatggaagaaaaagtttgttccataatcgtatgcatgactcaccatcatctgcatacacacactacagtagtcttttttgtttcccctgatgtgattaattgtacatcctctctgtttgggatgcagagccttggagttgtcctctacgtgcttgtgtgcggtgccctgccatttgatggaagcacactgcagaatctgcgggcccgcgtgctgagtggaaagttccgcatcccattttttatgtccacaggtaagggagtcgctagcacacagctatgaatgggttcatgaaagttagacccactcagttatcccaggaatttagtgatggagtataaatggcccacttacaaccttttttaactccagcttgctgacctgatgcctccaggaggcaaggttctgtagaaacagtatataggttttggcatcagagagccctacttgggtttgaatctgggccctaagtctgtctcagctttagtgtcctcatctataaattggctgagagttttgtgagggctgctattactgtaaggattaaatgagataatgtatgtgaagactcagtaggcccatggcatagcagtaatgcaataaatgcttttgtttcacttctgtcttcctaccctttttcaggatatttccacttattgggttctcattgcaatgtggttttaaatgccaaggataaagtaggctttgcatcttagtcttgctactgcttcatttcctatttctgtgctctttgtcctccagaatcaaatttaaaaaattttatttaacgagtgggcagtaaggtaggcaggtcttggaaaaatttaacaccgaaaatagatacaagatactcagaattaacagtattttatcaccatttatttgcacataagaagggaacattttagagaacgcaaaaagtcatatagttttgcttaatcatctgttttcattttaaggaagaacatgtgtccactgggttgacaacaaggtagaagcccatggtaattgcattttagaacaaagaggtgaaccttggagtagatttaacttggctcctttgaactgataacgtcatagtgtagaagatagtgctaaatgctgtgggacaaataaaatagagaaggagttaggatagtggttggtaagttacatgaaaaccccttcatggagaaagggacctttcagcaaagcctgaaagaaggtgagggtgaatgctgtgcagtccggggaagagcaccccctggctgttgaggggtcagcgcagaggccgcggggatggagcatggctgcatgtgaaggaacgggaaggaggcctgcgtgcctggaaggaaggagcggtgagagatgaggaagagagatgaggtcagagaggtaagagggagcttaattttagggcctagttaatgtaaagactttagattttactgtgactgaagtatacaggattggagggttttgacaggagtgatgtaatctgagttttattttttccaaattttatgatgaaaaatttcaaacatacaaaaaaattgaaaaattttgcagtgacttttgtttaaaaaagatcactttggctgctatgttgccggtaggctaaaaggtacaaaggctgaaggagggacaccagttaggaggagacttttacaatagtccagataagagatgttggtggctggttcccagtctggggtgtcgagatggagatggtaagaagtgatcagattcaagagatgctacctaccatgtgtggcaggcactgttcaaagcacttcacaaacattaactcacttcattattttaacaaccctatgagatacacaagattattgtctccattttactggtgataaaactgaagccaggagagattaggcaattttcccaagataacactgctaccaagtggctgaagtagaatttgaacccaggtattttggctccaataacatttagtgttggatttgatatgaaagaaagactccagagtttctatcctgagcaaatggaaggatggttttactgccaactgagatggggatgactggggaagaatacttacattttggagagatgttttagacatgtcatgtttgaggtgcacattagacatcagagttaagatatgaattggcagtcgcatttaggagagaattctgggttggggatgtatgtttggaatccccagtgtatagataatagttaaagccatgaggtgagctcactttttaggcagtggttacagagaagagaagaggtccatgaattaaactctggaacataccgctatttagagaacaagcaggtgaagaggtatcataagagttgctggtgaggtaagccagagggcctgctgtcctaggagacaagtgaagagactgttcccaggaggagggaggagggagtgaggagctgtggggagtgaatgctgctgccaagtcaggtaagaggactgagaactgaatgttgcatttagaaatgtggagatcgttaatgattttgtttcttttttatccccccacaccctcaccttcctagatcattaatgattctgaagtacacttttggcagaggaacaggagcaaaagcttaatcatgtggttgcaacaaaaaaggaatagaaggaaaatagacgacacgctctttccagtttactataaaaggaagcagagaagtggtccagtattgctctggccagggtcaccagtgatctcgttattgatcaactgcatatccttagtctttttcttaatcactgcccagcagtgattaacacttcacccttcccctccctccctctctcctttcctcccttcctccctaactcccttttttgggactgggtcttgctctgttgctcaggttggaatgcagtggtgtgatcgtggctcactgcagctggacctcccaggctcaagtgatcctcccttagcctcccaaatagctggagctgcaggcacacaccactatgcctgactaatttttttttttggtagagatggggttttgccatgttgtccaggctgatctcaaactcttgagttcaggcgatctgcctgccttggcctcccaaagtgctgggactattggtgtgagctactgtgccctgtctctttagagttatatgttagagcagctttagattcacagcagtattgagtggaaggtacacagtttgcatgtaccctctgtgctgtcctacctccctcccctgctgacccctgtcataatcaatgtgccccaccagagtggtatgtttgttacaatcaatgaacatgcattgacacattatcacccaaagtccatagcttacatttgggttttctctcagtgttacacattctgtgggttttggtaaatgtatagtgacatgtattcaccactataatacatataaaattgtttcactgcccccaaatcctctgtgctctgcctgtttatccatttctccctaaccccctgcaactactgatcctttcactgtctccacaagtttttccttttccagaatgtcatatgggtagaaacatacaggatgcagccttttcagattggtgtttttcaaatagtaatatgcaataaggttcctccatgtctcttcatggcttgagagcccgtttctttttagcactgaataatatttccttgcctggatgtaccaccctttatcctttcacctacggatgacttggttgcttccaaattttgacaattatgaataaagctactgtaacatctttgtgcaggtttttgtgtggacataaatttttaattcatttggttaaacactaaggagcacaattcctggatcatatggtaagagcatggatagttttgtaggaaactgccaaactgtcttccaaagtggctatgctattttgcattcctgccagcaatgagtgagagcttctgctgcgccacatccttgtcagcatttggtggtgtcagcattttggattttggccactctaataggtatatagtgatatttcattgttgttttaatttttaattctctaatgatgtatgaggatgagcatcttttcttatgcttatttgccatctatatatctttgttgaggtgtctcttcaggtctattggtcgtttttaacttcaggttgttttattttcttattgttgagtcactcattacattttaaaacactttttctcattgcttctgagatgccatattctccagttttcctcctgtcctctggaagcaccttctccatcttctctaccagacttatttttctctgctcatcctttagatcttttcatctttacaacatctttctggagccatgttatttactgctgtagcttcactgatcactgtggtgatcagtcctcagttaactttttgtcccagacctctcgatctagggcgacatatccaagtatttgctaaccattatcttcactttcatgtattgaagtcagatcaatggagacatattcagaaatgaacttgacttccccctccctagatttgctctattctgtatttgctgccttagtgaatagcatcaccatctgaccaaggccagcacaagccttgatgtttcctctctcaccagtgccacagctgatcagttaccaaatcctgtcaattcaaccctccattcatgtaggcacttctaagaccatactatcatcttcccttgcctcaattaaacaatagccaattatatggattcctggctccagtcttgtccccctctaatctattgtcaactttgctacatgactaatctttccagaacacaaacatataaataaataaaacataccacacacacacatacacgtacattttctctctctttctctctctcttacttaaacacacaaatctgattatatcattttctagcctgaaacttttcagtggtttaccattgcctctaaggtaaagtttactccataaggtggcaaagcattggcttacaaacatttttggctatgataagaaaaaagtacattttatactgtgacccagaacacgcatatatagatacaaatgaacaaaagctttgtttgcttgatttagagatggggtcttgctattttgtccagactgaactcgaactcctgggttcaagtgaccctcctgcctcagtctcccaagtagctgagactagaggcgtataccaccatgactgaaaacaaaagacttttttttgagacggagtctcgctctgtcacccaggctggagtgcagtgatgtgatcatagcttcctgcaatctccagttcctgggctcaggcagtcctcccacctcagcctcccaagtagctgggactacaggcaagcaccaagcaccatcatgcccgtctaatttttaaacatttttttatagagatggactctctctctgttgaccaagctggtcttgaattcctaaccttaagcgatcctccctccttgacctccatgagccactgcgcccagccagcaaacaatttttttaaaaaagcaaaacttaccttactatgtacagtgcatttcaatatattttattctattccattttaaaaaatgctgatttcgacttactaaattgatctcctatctgctatttcagaaacaatgacatagaaatacctttataacctgactcctgcctagctcttcagccccagctcccactctcccaccagtcaccctaattttcttctcgttccctgaacaagttctgttttctggagcatttcccactgccgagaatacatcttccctatcccaccccactccacccactcctgtattctagaattcagaataaaaaaaattagattggatagaaataagaatctagataatttctattcactcttcatgtctctaaactttctcttatcgtggtgcttaccaagctttatattgtaactacttctttcattgtatgtcttccacaccagactgaacttagtgaaagtacagacgaaacatgtctttttcacaactgtcaataacctaccacaggatctggtgtgtagtaggacttagtaaatatgaaatctgaatcagaaccaccccatccccagtggcatttgtttacattcagaataaaattcaaggagtcattattactatggcctacaaggcacagctgtcattgccccttctttggtctcatttcctgttactgttcacctccggttctgagctccagtcacagggccttccttgctgtttctcagacttgccaaacacatacattcccctcagagaggagtcataggtcccctcagagaggcctgtcctggctacccccatcattctctttctgtaattctgctttttcttcatagcacttactttattgtctcctcacctcctatcaccacttgaccataataagcatttggtttttgtttactgttatgttcccagggctttggacggtgcctgagttctagtaggcactcagtaaatatttgttgaatgaattaatgcatagggttgttcgaacactgactccaaaagcccctctggagagtagtcttatccaaatcataatatcagtagtaatatcaaataattacatttgtttagggcttttgagtttataaaataatttcttttttaataggtttattttttgagacaggatctctgtcgcccaggctggagtgcagtggcgtgatcttggctcactgcagcctccgcctcctgggcccaagccatcctcccacctcagcctcctgagtagcttggtctacaggcgcacgccaccacgcccacctaatttttgtatttttttgtagagatgggatcttattatgttgcccaggctggtcttgaactcctggactcaagcagtccgcccaccacggcctcccaaagttttgggattacaggtgtgagccactgcacccagccaatatattttttaaaaatatttcaatttttcagtttttatatttttggcgacagggtcttgctctgtcacctaagctagagcctagtggtatgaccatagctcactgtagcctcaaactcctgggttcaaacaaccctcctacctcaggctccaaagtagctaggactataggcctgtgccaccattccaagctaattttttaaaagattttttgtagagatgagtctcactacattgcccagtctggtcttgaactcttggcctcaagcaatcctcccaccttggcctcccagagtgctgggattatgggcagaagccagcatacgcaacctaaattattttcttttacttaatctaatttgagctacataactatattttagaataggtaatagcacatattttatcatcttgctgatgaagttttggaagctgaagtttagagaaatgagttaacttgccaaagccacacaggtaataagtaactaggtcagtattcaaatttagtgtttgttttactacaccatactgttgcaaaaagagcaagataaaccacttcctttacttttccaatgtccacagtgtttcctgtgagcaacttggatcttttctatcctccacccccatcacctcacaccatggcaagagattcttactgaacccttcccggagccggcttcagatagggggtcctagaaaacagctaagcatgctgtcagccacactgtctattagtgcttagaaataaactaacagtctaactgcttagaactattatttgtaatatgatgttagttaacctgaaagcttcaagactcagagaaagccaacaggattatcctaaacgtagtcgctctttaatcccagttaaataattccctaagtagcaatacaagtttttgtatgattagtacagagaatgagaaacaaccagggtaggaagtcagtagatacttgctatattaccaatatgatctctctggcccttggtaatatacatgtgcttggcattgctgaatgtcataggcctaaatcccaaggcccattagagaatacttcaaaaggataaggcatagcagaaaatgaattcatcggttatttaggcttttcttagcttagacaaccttcaagtaccagaaagtgtcaggtgaaggaagtttagagtctgtcccagagtcctttttctgcttacgcctcgtgtttctgggcacagttgtatctcagtagacctggagcatagtcttctgatggaggcgagtgctggctgcttttcagcctgtgaggccagctgctattgctgtattacgggagatagcgtgattgagagaattccttatgcacaagatccttccttttctcagctgttgtcataggcttgagctgagtttatctgtttttcttcctgaagggtctagaaactccagcagagctggtatagtgttctaaatgatcacttggaagaccagagggcaaagcctctaccatgtagctgcttctagccaagttgaattccagagtagctacatacagctgtgtgggaggccatgctctgcaaatggatatagttagctcaagaattctaagctgctctctattgtcagtaatgtgtggaatgaagtatcctcacaattcatgtatatttctatgcctggtgttgtttgtttgacacaagtttcctttcataggcatcctgagatgtactaaagacatatattttcaagttggaatgacagtggcatacatttaaaagaggatttatttgaggctaggttgattgtataccacctagtttttataattatgtatgtgtcttcctcctctccccactagaatgtaagcctcttgattatcagagctgtgttttacactcaataccttccataaaacctgacagcccctggtaagacataagcattcagtaagtgtttttgaatgaaaaactgagtcatcactacttaactatggaatcttatatcagactcttgtttttttttttttttgggagacagattttgccgcccaggctggagtgcagtggtgcgacctcagctcacggcaacttccgcctcctgggttcaagtgattctcttgcctcagcctcctgggtggctgggactacaggtgcgtgccaccacacccagctaatttttgtatttttagtggagacggggtctcgtcatgttggccaggctggtcttgaactcctggcctcaagtgatctgcccgcctcggcttcccaaagtgctgggattacagacgtgagccaccgtgccctgccagactcttgtattatattattaacatgatctaaattatttattcatcaaaccacttggttttatatactttttttttttttttttttttagtgtagagacaagattttcatcatgttgcccaggctggtcttgaactcctaggttcaagcaatccgcctggctctgcctcccaaaatgctgggatcataggcgtgagccatcacgcccagccatggttttatgtagttttgttatatgagttattgtgaaggtgaccaagtcaaatgacttttaggtgtaaaagggtgttttgatctactgtagagtttgcttcctattccttaagtaaaataagtttgatccaggccagtgtttttggattaaacttctcagagcatcccaaagagcagtttgataaaaccctgagtctaaattatagaaggattaaaagttgaaacttgctgttttcttgagctgttgtggaaggtgaaacctggcctggcttcatgtgttggcaaatatttcctctgatctgcccttccaccgatggatgcaaataacttaaattttttgagcaccagattcattcaatatattttttttaacaacatacttaaagcctagtttaccctattcccctgttgtaccacctgctagcagacatactaagatcgtttatttaactgaaggaaaattaatttacagtgaaaaaactgcagcgttagtgaaggcatagagatctcttgtggacaatatttttgagtctttattgattagacttcattgtgacttaattaattgtaatactgcatgagcattttattactgggaacgcaaaacccaggcttacataatgcttctgatggagaatgtaacctgcagctactgccaaaaagcttctacttagaggcaaacaactctgccctgataggcttactcatcaagaaccacacagcatcttgcttggctaaaagcactttgtttagaaccaatggggcaagggattaaattggctcacccaccaagtctccatataccgaggggctcagagtcctcaaagcagttttctcataccttttgagacacactgcaccgccagagagaaaaatctatgtagtgctttcatgtcagtgaatgtagaaatcacagctgatgtcagaaaagaggttaagaactacttcagagtgaaacaggccagccgtgttcattcccatgacctaacataactaaaaaccagtagataaatagtggtactgccctatttattattagccttttcaaaccagctgtctcctggcttatggcaaccctaaatagaaaaataaaagaaggacattccaagtggaaggacttcagagatatggataatagtcaacatttattgaccactttctatgtaccaggcactgttgcattaccttatttaatgttcagaacaactgtctgaggtaagctgttttatgaggtaaactgtatgagaggttatttgataaataagaaaactgaggcatgataaggttaagtaacatgcccaagatgcacatctagtaagtggcaaagctgagatttgaacccaggcagtctggcttcagagaccatctaaccatatgtgtttgtattttcattctcaataaatacatagtaagttagtccaagaatcaagagagtcatagaatggatatatttgtctgcatcgggattacttactgaaaaacgagtagcaggaactctgtattggacctggaggcagaattttcttaaactgtaatgactgatactaggagtcaaaagatactagaatgtaaaccacaagatggacagcctcctgtaaaacagtatagcaagccaggatcttttcagggttgggctagagctaaatcttggcatccctaccctttaggccaggatttcctgatttctgaattttaattctggcagcatcatgcccacctagaaaaactgatcgaaagtaaggaagttcaagaaataggtgtcatttttctaataaatggatatacatgggtcaaaaccttttctttgtggtctgtctcgggttgataaacttggtaaaactgaagagaaaagcctctcagtgcatgtttattgattcctaaagaaacttttcttatgggctccatctctttgcgaaagtgttccaggccatctccctatggcctctatgttcagtcactgaaagtgtctcacagaatttagagatataaagaactttatttctattccaggatattctgattacaataatttgcagaaaccactagggttggaatttatagttaaatggataattctccaccttcttttctgatatcttactgttggaatatcatttttgaaattttactgaagtgtgggacttccatttttcttcccccgagcaactgaaaataaatgtttcaaaacatgacagttttttcttagtgccattgtgtcaagagaagctaatctcaatgcttattttttatgagtcggatcttactgcagtcagtgctgtcataggttaagttccaaggttgtgtattttctttgtttgtgtaaaactgtggcattgactacatccttgtcaggcttggtggcatgcacctgtaatcccaacaactcaggaggctgagatgggaagattgtttgaggccgggagatcaaggtggccagcctgggcaacatagcaagaccctgtctctaaaaaataaaaataaaaaaaatagccagatgtcactttgggaggccgagatgggcagatcacgaggtcaggagatcaagaccatcctggctaacacggtgaaaccccacctctactaaaaatacaaaaaattagctgggcgtggtggcatgcacctgtagtcccagcaactcaggaggcatattatcgtttatgaggcaggataatcatttgaacccgggaggcgaggttgcagtgagccgagatcgcactgctacactccagcctgggcgacagagcgagactccatcaaaaaaaaaaaaaaaaaagccagatgtggtggtgtgtgcctgtagtctcagctactggagaagctgaggcaggaggatcacttgagcccaggggttcgaggctacagtgagctatgattgcacccagcctggccaacagaatgagactccatttcaaaataaaaataaataactagtcctttaacttggtatttagaaatgtttatttctattatagcagtaatatgtcaaaatttaatgtatagaataaaagcattccaatccttataacaccattgttctagcagtacccaaaataacaaaatttcagtgcaacaacaaaatccctgtattttgtattattatagttaacatttatacaatctctgaatgtatctataggttagcacatttactgtatgttatttatatatacaaatgtcattttttttttttaagacagagtctcactctgtcacccaggctggaatgcagtggcacaatctcggctcactgcaacctctgcctcccgggttcaagtgattctcctgcctcagcctcctgagtagctggaattacaggcacacgccaccatgcctggctaatttttgtatttttagtagagactgtgtttcaccatgttggccaggctggtcttgaactcctggcctcaagtgatctgcctgtctcgggctcccagagtgctgggattataggcgtgagccaccatgccgggcccaaatgtcttattttgaggaccatttgtctatttgtttacatttttaaatagtgactatgttaaataaataggtttgatcttagctggcagttgacattgacagtgtttcttgagcgtattaataaaacatcatttttagggcttagtccacaagcagagtgaagattcctaactctggctggcttcttagcaaaagaaggtatcttggcagaaaacacccctggtttcttattgatttactttttaattatttctgcagggatcatagcactgcaagatagtcacactgttctgtccatgttataacaagatcaggacattataacagactttattttcttttcatgaggaaaaacagcatgttttgtgtgcagtttgtcttttaggaaaaggcaggcagcattaaagaggtgctctgagacaaacattttttaaatccagaacatctaaaatacagggatagactcttatcaaagccatgtggctccatcctgagattgctgttgcaggccatccattggtcttgttctgtttgctataatagcatcacttctcccccagggctggtacccgagctggacaaagtgagtggataacagcatcaagcagtgtattgcatagcatccttgttctgaaaactttaagactttaatgtcatttaacttttaaaaggtttttgtcaagtaattcattttccatagaaacatgtttcagagatttaatcgccaatttatttttgtttcctttttagattttgaaatttagaaaaaatagaaccctctttgaagtgagaattgtgccagaagcaattcattactaagaagtaaacatttttaagaagtttgtttaaattattgaaaatatagaactcttgggctgggtgctttagaattacctttgaacacacctaccattgactggaccaagtacataagaaactagatcatccccttcttctgagcacctgtaagcagcatgcactttcttgcctgcaagaaagcctttctgtgccttctggtacacagatgtcttctgtttccaccagctcaaagcagctttatgtggtcagaaagaatccatgactcagtttcttctatgccattgctcaccacagagctggaaaggattgttttgccatgttctgttctttggtgtcacatgcagggtttcagggacaaatggctttccctccttcataggatcagcctgaagagtctgatgatctggttccttaaatttttacctatctcctcttatctttgatccttgattcgggaagccttctgtttcaagccttccatcatagtcttcatcaccttgcaacaactagagtatataaataagtttgctctaccacagtgtatttaatcctcaccagcaaaattatgaataagacaacgctccccatttagtgttctcatgtccctgcctcattaatccatccaacttgccgtctccccttaaagctagttcttggtctttgcaccatctatttgcctggcccattttgtactaacctagcttgtgggtgattctgtcatgatggaacctgtgaagatgacatggcatctgatctgccagaggagagaattgttttggtttgttttcataacccagaataccaataatgtgtttattttaggtaccatgtaggttaagagctccctggagtaagactgaccagaatttgtattctgctttggcctcttattatctgatcaagtttctcaacttctctgattttaaattctctttgtctataaaattgagataatagtattgggttggtttgtgaagtagatgcttaagttaacttaaagggtttagcactttgcctatcatgtaaatggtcaataaatgttagtaatgattaaataatattgttgaatgaattgctctattagtctttcattctcttcttccctattttttttactcttttctatgtatctttctctcatttttgctctcttggtatgccaaagggacattactattttcagtcaaatccacacggcttatggagaagacttatctcccaagaattgttttggtttgttgtaaccacttagagaaatttgttttattatcaaggacaaaaaaaaagaaaaaaaatgttgctttcacagatacggactcacactggcaatgtcaacttaattctcattttaggaccctgcccatacagcagctctctccccacgaagtcatccaaatgcctggcagcgcagcagggcaaggcctgtgctgaacatcctctagttaacgttctgttggcagatcaggtttcctgggcccacagtgactctcactgcggagaccgcttggcgtcttgcatggagcagatgaaagcagctctgaagggaagctgcttctctggcacacacaagcagaggagcatattcttgcattgcccaaagtggttcagtttcatttagcatcagaggccctgccttttgggtgggagcaaataatggggcccttttattttttatttatttatttattttatttatttatttttttagagacggagtctcgctctgtcgcccaggctggagtgcagtggtgcgatctcggctcactgcaagctccgcctcccaggttcacgccattctcctacctcagcctcccgggtagctgggattacaggtgtgtaccaccacacccagctaatttttgtatttttagtagaaacagggttttaccatgttggccaggctggtctcgaactcctagcctcaagcaatctgcccacctcagcttcccaaagtgctgggattacagacgtgagccaccatgcctggccaacagggaccttttagacaataaaatagagtagttcttggtatctggaaaagttgatgttttgtttaatgtgagggctccatctttccatgcttgtaaattgaatgtcctgtgggtgattgtgttcttaggtttgagagcatctattcccctcgttttcaccctgtttccatgttttatgtagaatggtgtcttcaaatctcatctgaatttaatttcatgaactacatgacacttaggaaatatgaattgatgatgatactctagctttctgcattttgtcatattttccatctgcaccacatatgaaaaatgttaaatttctgttccttggcacgttcgatattatgtaggatagtcaagattaaaaagctcttgcccttgacactgtaaccaagaattgttttggttcttaatctggggcctgtagacaccagggtctgggggatctatgcaggcttcataggacatcgttgagtagtctaaagttacatgcaaggtcttgtgtataaattcttgtgcagatttttttttttttttggagaattttcaaggcatctgaggccaaataatggttaaggatgactgaatagaggtttcaagatcctgaaattgaactagatatatcttctaattaggaattattatggtactgtttttggtttggttgtgtgtgtggtggtggtgttgttattgttgtttgcttttaaggaaattgccttggaaaaaatctgttttaaagcaagcctgtaactgaacaccattcagctttggtcatcttatgcactaaattgtgtgtggagaccaaaggaaaacaggagagtgccatctagaggccttaacaacagtttggtcctagccttctccctacacaggagtctttaacaacttcctaaattaagaacacttttgtcctcttaagtaactgcaaacgataaacatatgtgtcaatgacatttataatctatacaggtgctgctacagttgtggctctagccttactactctggaaatgtaattttaataaagcgtactgttgtagatggcatttactttattctataggaatgtagaagtctttgagatgtacactgcatttgaatatagttttaattgtaaagcaacaacaaattgatgcctgatgtaagaaatcattttgatataggaactttgttgtattatcttttgaagttagagtaaattaaaataagagtaatttatcttagttacttgtagtattcttttcacaacagtaatatagaatggtgtttgccaaatggtatagaaattgaagagttgaattcaccctagaaaagtagatcaatttatatccatgtggagatgtataatagggtagtcaagagcacagcttagaagtcccaactttaccatttctttgccatgttgaatatgttaactttcaaaatcttgtttcttcttcatttataagtggagctaattatagtctctaagttaaggttgttgtgaaggttaaatgtaataaagttggtaagcacagtgcttggtatatcaaaagtagttttttgtaataatgtcttactgttgttgttattttcactgaccagttttgttttcaggacggttgtgattaaatagaagcagaaaatttaaaaacctatagaaaattttattttaaaaaaattttcacaattacaatcttatttgattaaatactcaacaaatatttatttacatattcagtagatatttatgcagctcctaagtgtctagatataataaccattttaggtactggagagttgatactgggtacaacagaaagaaagacatgggccttgcattgcagtggaggagtcagacaataagtaaatacataaacaagatggtttcccaaagaaatcatttgcgtgaagacaatgaatgtgatgtaatagagagtgactggaggcccatcttagagtagatggttaaagaagagctttctgaggaagtgacgtttaaactcttacctgaatgacaaggagccaatcatatgaagatctgaggaatggccatttccactaaaggaaaaaacaaacaaaaaaacacatgtaaaggccattggatgagagtgtgttaaacatgtgcaaaaactagaaatgtgcatagtggcaggaaaccaggtcagagagggaagtagggggccaagcgcggtggctcacgcctgtaatcccagcactttgggaggctgaggcaggcggatcacttgaggtcagttgttcgagaccagcctggccaacatggtgaaacctcgcctctattaaagatgcaaaaattagctgggcgtggtggcacaggcctgtaatcccagctgctggagaagctgaggcaggagaatcacgtgaacccaggaggcggaggttgcagtgagccgagatcgcacactgcactccacagcctgggtgacagagcgagactctatgttaaaaaaaaaaaaaaagggagagagagaagtaggagccttggaggcccaggactttagatttcattctgagggttatgggaagagattggagagttacaggcaaagtggtgatatgcccaaatttatgctttggaaaaattccttttgcctctctatagaaaacagattgtaatggagaaagaatggaagcagaaagaccgggtaggagacttttgcagcgtgtaagtcagaaatggtggcttggataaagatgttgaattaatggttcagtgctgaattagtgttgggggatttggatcccccaacaactctgcaccacaggggcagggtagcattgtggttaagagaaccaggtgaagagtcaggctatctggtttgacttaatagccatgtgaccttgacaagtttctttacctccctgtgcctggtttttgctattcctaaaatgggaacaatgatagtacattcctcctaggattgctgtgtagattaaatgaggaaataataattgtaaaatgctcagaagatgcatcaatagtgctgttttggtatcatcatcactgccttcatcacaactattactctcatcaccctcagtagccacattttatagatgagaaaacttagaaatagagggtggttttgaaatcagaatatacgtttcttgattttgaatccattgttctttctgcaatgtaatctgtaatacgagctcccagagaaaaatttctatagatctgaatatctgtagctcacagcccagttttaaatacctatgactatttaaataacattgagaagaaaatgataaataaggctagctgaatcccagggcataggagagaagtagcctgtggctctctccccacacaccttgtgccatcagaaattcaagttccctgagttttgaagaagggtattgcacacctaagccaaaagcattagtatgcgcgtggtggtacatttaggaggatagaactgaatattttgagaaccttgtaagatactgaatctctttagaggccattctactcttcattacttgtgttaaatagggccatatacataatataaataaatgaaatccatggattatccccagaccttttctggtcagccttttggtgaaggcaacaaccagactaccacacttgagtttctttttctccacctctctctgcctttgcttagccccttctggtggcataagcaacagaataggtaaggatcaaagagcaagagagacaaaattagaagcagggagttggatagcctccctgctggctttgcccctggttcctctactcccctggtgcctcccctcaccagagactgaaggcaggctgtttgtccattgcagaatgtgagcatttgatccgccatatgttggtgttagatcccaataagcgcctctccatggagcagatctgcaagcacaagtggatgaagctaggggacgccgatcccaactttgacagggtgagctgggaaccgctgctgcaggggactcctctgaaagctgctgcagcctcctttgcatgtgattgtaatcaggccataacctgaaaggcggacactgggaacaaactattatgtaacactaaagcagcacgtgaagcaagcaagaaggaatgtaaaaccagttaaactgctggagaatagtgatcatggttccctaccatgtgtccccaaattatcgtctgtttttggcttttgagatagcacagcctgcagttctgcagcttacctaccatggggatgtcgccttcctcttgtcttagtgtgctcaattcagtggcttctgtagcatgcttttatttaaaccactatggccatgccaggtatgccagggagctcaggaaacagtgagttgttgtctgtttacagctgatcactcagggctctcttccttagactttgtctgaggccaaaaatatcccaagccagagggcatggaacaggttggtcattatatatgctgtgccacatttgatgtggttaattggggggttgacagcttcctcctttttatgttacagttaatagctgaatgccaacaactaaaggaagaaagacaggtggaccccctgaatgaggatgtcctcttggccatggaggacatgggactggacaaagaacagacactgcaggtatctccgaaggagtggagaacaaagtgggatgtagcagttcctctaacctgctttttccatttttcgccttctcgggaacttgggccttttttttcctcctgtttttcttcctctgccccttcctgggccttggaaagaaggaaagaaggtgctttggctaatgttattactgaaagggttctggtcatcaacatgccatttcaccagggttttgtactcttttcccttctctcttggtagtcattaagatcagatgcctatgatcactatagtgcaatctacagcctgctgtgtgatcgacataagagacataaaaccctgcgtctcggagcacttcctagcatgccccgagccctggcctttcaagcaccagtcaatatccaggtgggcaataactccagtgacctagttcaggacaagtaacaccaggggggtaaaggttagctgttgctcactaaccctaagtcgagagtttcttgctcttccttacctctgtctcctcccatttgtcatctcttcctttgtcagaggccaatcaaagatctgaaccttttttgatggagaggagggatgagcaacaatagttgtgccttttgtttttttgaagaaatagcaaatcatgaggcgatgctatcctcttcacaggatgcttccttgttgtgacttctaagggccgatgaaccaaaaactttagtaatcagggaaacatagactttagcaatcaagactacttggaaagactcattatttctctctagtgttaaaggtatgcgtgtatatgtatgtactgctttccaggcggagcaggcaggtactgctatgaacatcagcgttccccaggtgcagctgatcaacccagagaaccaaattgtggaggcaagtagcaacctgtgggagctgtcagctgaaaccactttctttgccatatccttgcttcccttccttctgatttctaactcgatggtgtttccctccacctcagccggatgggacactgaatttggacagtgatgagggtgaagagccttcccctgaagcattggtgcgctatttgtcaatgaggaggcacacagtgggtgtggctgacccacggtgagtatccggccaacagccctcactaacactggggcaaagaattgtcacctgactttcagtgtctaccatggcacatttcctactacattgtatccccagaggagatctaatccagtggccaagtggacaaatgatatgatgtaacttatgtatgtagacaattaaaatttaaatgaataaggatccaaaatccaataacaacagtttcccaaagtgttttcccaaaatagtctttcatgatgttccctgctgcctgcacactggaaaaaatggactgaaggccagctcgccccatttttgttccacggttgaagactctcaacattaaaatagccttacctcttttctggattttttctttgctgagtaggaagagaaggttgtggcaagaattctcctgagaggtcaaatcagggcaaagctggttttcttataaatatctcttttcttccagtgaatttccaaaaaagactcccatgcctgctgatgtgcttgctttatgtctcttgttctcagcctatgatcaaataggcaataggggaacattctggctccacagactgagatagctttaaaggggtggagccctgagtcgctctgttagtggaaagatgtcttactttaaagtatgctgtaaaacctatcattgtagcaagatagccctgtacatctagtacttatctgtcctatcagcactgacaagagtaattgcattctttccctggtgaatcagttgctacttcaggcagccattatcttagtggatggcccatgttctccagaaacttggtgttcacctccaggatttgaaaacctgaactggactggtgccactatttcctcttggctcagagctgttggttttacatgaatggccaataaagaatagcaatccttcgtcccaaatagtaaaggagcagagagttaaattccacactttaggcttttgctttgctttaggatcttaaagagaaacataaattcaggaagaaaataaaataagttgtactgaacatagcaatgccatcagttttgggatataagcacttttgagtaagaatgttaactaaacttctctgtcattctgttttgtatcagcacggaagttatggaagatctgcagaagctcctacctggctttcctggagtcaacccccaggctccattcctgcaggtggcccctaatgtgaacttcatgcacaacctgttgcctatgcaaaacttgcaaccaaccgggcaacttgagtacaaggtacctagacatggaagagggctggctccagaagaaacaaacttgagcttcctttgagaggctatgaggcaccttccctaggacttaagggtttacttatagagaaagatgatttatcttgcaaagtagctcgggtgagcgggaagcgtcctctagtctctgtcatgacccatggctcccttaatttccatagatgagtggcttgcccctttctccccgccttcccctcatctcatggtccgtcctccccactctgttcctggcaggagcagtctctcctacagccgcccacgctacagctgttgaatggaatgggcccccttggccggagggcatcagatggaggagccaacatccaactgcatgcccagcagctgctgaagcgcccacggggaccctctccgcttgtcaccatgacaccagtgagtagcagcacagagcccaattcactgtctcagaggcttttgataaaaaggttgtgagcctggggttgggaacccagggccaacctacatgtctgaatttcctttttctccaaacttaggatgctccagcccattttcttcaggccagtagagttttccacactttatttttggcgaacttacttacttagccaagttatttctacattgaactccactcctggagagctttttcctcaatgggcgctcacaggtaccctggttaagtccagctgcactcctgccagcttggggcaggtagcagcctaactcagagccttctcccaggcaacctttccctgccagaaggccaaagtgcccttaaattaattggtttctagactggcttccaaaattgccttttcactaatgctttctccattgataaacacacctcacatgtttggcataacctggatcacttgatgatttgctcccacagctttagccgagtcagttatcttagtcacatgtccttcatatgatagtcacattcagagattttttttctcccttgggttctgtttattttcctgtcataggtcattcattcattcatttattcattcaatctcatagtaccataagattgggtagtaaatatatccatcacccttggagatgttgtaagggcagtgctgctttgaggacccttttccctcctttaatccatcatgggttaatcccttgtaaaatatagtaaaagtgaaacattagaacagtgaaaatttaaacacatataaaatacaaggcattttttattgagttcaacagacaaaattactctgttaaattgctaaaagtgtctctttatttatttttttaaattgctaaaagtttctgaaagccttttgttgatttctgtacttaccttatcatgaattggtaacaaaacagtttgtgggcatgggtccatgggccacactttcagtaatgaaagaattatatatcatagcccttgccatcactgacaagatcaacatatgtgaagtatttgactaatagtacaagatcatatgtgattaagtaccacagtaataacatggaaaattaggtggcagaggcattcagagatgggcaagacaggtttggaaggatcatggtcagctttatgggacgtggggtgacttactgtgtctactgtaactgtttttgccaaggtcgctaacaagttcttgttgataaattcagtggacatttttaaccttttatctttttggacgtcccaactgtattaatcactgttgacttcttttttccttgaaatattttctgttcttggtgtctgtggcaccacattccctgtgttttcccccacctctccttttcacatttcctttctgcttgttccttgaggttggcaaaacccagagttttatcctaggccctattcccatgtcctttgatgtactctctctggatgagtttgtccactcctgtaatttcagttactctctgattctccagcccagaatgctcctctgagttctacacatacgtgtacatgactgcctatgggatagatttagttggttattccacaagtattcacaactttaattcagcatgtcccaaatgaacttaccatgactctgtaaaacctgctcctcctcttgggtgacagtgaatggcactgtcattctccgggttacacaagctagggatgtgaattttatctttaactcttgtctttcttatttgccatatcaagtcagttgtccagtgcctgtgaatgaaacatcctctccactttcctttccttaactcaggtcactgtcatccattgtgtagatgaacaccacggcatcctaactgacttctttgcttccagtcatgtcccctgatccctgccaccagcccttttcacactgcagctagagtaagctggcttttgcaaatataaatctttataacatcatgcccctgcttaaaatcctttagtgattcaccactgttcttcctcaaacttcttagtgtgttattcaagaccatttgtcactggccacagcgttcctctcctgcctcatctacagccacttcctgcctcaccctgttcactccacccttgtagaactgtgggaagggatccaggaaccctgggagctttccgacaaaattattccaggagtgttttgttttgttttgttttgtaattagccattttgtaaaatactcttttataataattgaagtgtgatttttgttctagtgactggggcatggtgatgatgtgggcacccaggctatgggtagctagcaaggatgcagatgggaaagtcacagtgatacaagcattgtggtggttctcatttcactcacatgttttggcgagtaacaactattttaaagcagtgaattgatactacacaattgtatcttatgtaccaaaatgtaatttcagtaattcactatgctttcctggagttaagacatttaaactccggaaatcacattaatatgaaacaacaggtcaagtcctagacatttcaggtaaacaatcttctactgtattttcgggtcctcaaacacctacaggccttctcttttcttctgcctggaaacctgtaactcctgtccctcttggcctgaccagctcctgtgcatccttcaggttcctgctaggtgctacctcctccaggatgccttccttaattcccaaacacccccattagaagacttgatcatgctattttgtaattgtttacttgtctctatcctctactagactgtaaaatgagggcaaggtctatgtctgtaaattcacattttatcctgtaacagtaagcatttggctatttgttagattaataaatgaatgaatgaagataaataagaggaagaaattctaattagtattacctaagcaaggtaaaaatggaaaaataggtatatgaaaatcctgtataacccaggagtctagaaaagttctgtaaataagaaagttaacagaaagtcctgccccaagcccagttactagagtaagaggcatgacagaataagctgccaccttgagcttttccttcctgtctctcttcaggcagtgccagcagttacccctgtggacgaggagagctcagacggggagccagaccaggaagctgtgcagaggtaatgtgacatctggcagtgcttgcagaagcccctgggcaggctcccctgcaaccagcgaaaggtcacctctgcccaaggaggtggtagagtgcagcttcaacatttgtgtggtctctttgctcaagccagatggcatgttccaccccacatggaagtaacagaagactacccagaaaatgtcatttctgtaagcaccattggaagtcccctaagtgacagcaataaccataagaactttttctttcctccctccttcttccttgtcccctgccttcatattgcaactctgatagtattcacaaggcacaaagcctgctcgtacctgccaagaactgtttactgaaaaggaattggagatgtgggatgacagtgatcctagctagtctggccatggacctctggcatggacttttcctttccaggagaatgaatacctcttgtactgtttgctgtgtgcttcttccacccccttgtaccaacaaagagatattgaaaaagagaatatgggattcgggccagggacagatgcaaatatccattgtttacagaaccttgttgagagatgcctaactcacagagaacggcagtgaccatcaggcatgctgtactgttcatttggcctcagttccgttagccctggtccttagctccatgcatgcccccttgtgggagttgattttcttattatccggggagggggtttcaccagaatccagcatgtattttcccagaaatacaggtgttcttcaagattatatgttttttcctttgagggaagttgaaataaaatggttttcatgggcttttggggaactttgggtgtctttatccaatggttattaaaacattaatggcttactctttggcaagttcacataacactgattactctacagtctgttaactgattttagctgaaaggggcaagatagttaagaatgaaatgagaccattttttaagaacctgccagttgctggctaggactctcatcctatccccagtagctctgtgtgagagctgctattcagaaagcagctggtcctatgtggaaagaaaaccatggcaaacaggggtgttggcaggtgggccagctccttctacagcttggccaatagaaggaaaattctggtaacttttttttttccttgatgctgttgtttctatagtttgctgataagagggtatataaggttacaaatgggccctactgggtcatgaagaaatgagaaatcaggaaatttactgcctttctaccttaaaagagacagcaatattttatcttctttgtcttagactttccttcctccaggtctaccttctttcttctttagaccaacatttcaagggtataatgcccatcagttttgatgtaataaaaaaggtgtagtgcctcttttattcatgcctccagaagagcagcagcggtggaggaagtcatccaccagacaaagagggacaatatcttattgatggtattaactaagtgctgggtctgaaagatcttccgaataaaagccatcagtttgggaactcttcgtcttgtgagactcttctgtttttattttttgccttgctttttccctccctaactaaacatttcatgtggttttatttcttcatcctccacagaatgttggttccccaaggacaacatcagtttttcttctctgatgattgagttatagtcaccaagcgagagggaaagggtggttttggaattcatttatcctcaaatggaaggatcagttttctgtgacctgtagtgaagaaagtctcaaacctggggcctgtgagatcgagagacatgcacagagtccttctgaatatctccccaggttcatctctaggaatagtccttagggctcatttcctctgacttgtattttggaaatttggagggaaaagatgaataaattaacatggagaaaataaattcttctaccgagtagaatgaagcaaggaaaagtgatctcatctttgtgagctagatctactttctctcttctcttcaatggctattcttaggttcaaaattcagccacttcattgtcaagccaacttctgttggccagttagacgtgtctcacttccatccaggcagggatctgtttgccatcaagccttcgtgagctctggcactatttcattgagtgctttggattaacttctaatgcttcttgtggaggaatattcctgtctgtcttttttactatgaaatgtgctcctgcttgttgcaggtacttggcaaataggtccaaaagacatacactggccatgaccaaccctacagctgagatcccaccggacctacaacggcagctaggacagcagcctttccgttcccgggtctggcctcctcacctggtacctgatcagcatcggtgagtagccacatgagctgtgcgagctccttgaggctcatcggacaggcacccttctgattagtctcacagcgacggtgactagcatcgtggctttaaatagaagccagctgtcatcctgaactcacatcttctcagctccttgcagtaagcaatgcacagggcaaaggttttttactgcgccctggagcaatgcgagattcctctctcccattaccttgcagacctgtttattgtctgcatttgattcccatgattctagatgttgattcatagataaaattgaacttgagacctgcaagaaagtgaaactctcagaaggccacctggaaacaggaagatttttagccatatcgatagacttgacctttaataatccatcaccttcaaaagaatgagcatttcatatcgtgttaccattgaaccgccagcctggaaatgaagacaaagccccttctgaatagtagagcagagatcctcttgagcgatgtatttaagaggtcattctttcaatattctgatggcaaaaatcttttgctaggttcggttatggttataatccattctcttgaagaaataaaagcaagtttaaccttcctgaccaagaaaacttcattgactccaagtaagcctggaagcagctgcggaatgacactttgctagttgaagaagatgattatcttctgtgactatcttgatgactaaaaatctcagtcttggccactccgaagctatccccaagctcatggcccacacgttcaaagccaccaccagttactagagcgtattttatttctgtcttttggggaggacactgaaaagcagccttgggaaggttgaaaagcaatcagattccaaggaaactaggtttatatatgtggtgttatgaaatcttgcagccagcttgcactggcaagcttgacacattttttttactgaggctggttacccatttggcatcaacataatcagcagaggcaagtgaactctgagcagagtgggacataattagtgccacgttggaaccctaaaagaaggaagataagctttcataaatgactatgagtaacttggtaaaaatggtctgtcaggagtagcaagaatgacaattctcaaataaaactctgatggcacagaaagacaggctttttctaatgaaagtctctcaggacttacagtgttcgtacacactaaagagcactttgaggccaggcacggtggttcacgcctgcaatcccagcactttgggaggccgaggcgggtggatcacaaggtcaggagttcgagaccagcctggccaatatggtgaaaccccatctctactaaaaatacaaaaattagccgggtgtggcggtgggcgtctgtagtcccagctactcgggaagctaaggcaggagaattgcttgaacccgggaggcagacgttgcagtgagccgagatcatgccactgcactccagcctgggcaacagagtgagactccgtctcaataaataaataaataaagagcactttgagtgattactggagacctgccttctcctcccctatacgtttcctgtgatttctcataacttcaagctctacactggtatctaatacaccctttattccttcttttctccttgtctccttcttcccttcctccacagcctgacacttaatgtttcagcccttgtctgagtctgttgtttagctgaagtcctttaggtatccttgttgaatgctaggtgttcctcaggaggtcttcttatgaggggaacatgaagatcgtcacatttccagagtcaggctttatcacagaccctatattctgttgacatttgttactcaaggaggtccacactggaccacagctctgtctgtgtgatatccaccctgcctagagtcattgtcaaggccttgcctgctggaaatctatctgctgtctgttttcatgtgaacctttttggtgttttgagggttgcctgtggccaagcctattcgaattggaagaaaatgatgttttatgagtggcaaattgcataagatggggcatttgtgcaaacccagcatgtcttgatgggatcactatacaaatatgcagcaaaagagattaaagccagtcttcaggggaaatgagaaactttccaaggctataaaacatggaatacgggtggcctgcatgggttcttgaattcctttcattttctggaggaaatgattaaagaacagtatatatagctatccttctggggtagaagagatgaagttcaacatggaaacagaagagtggtctaatcaaccttttcatttctggaaatgtgtaatttaaggttaaaaatgttttaaaaagtgtaactaaaaaatttttttaaactaacacaagatagattttatccaggtgggaaaccaagtccctccttgaagagtatagtgtgggagtatcagcctaatgcgaggccatcctgaatttgagtgtgattgcaaataaaaataaaatcaagcacaattgatacttatcagtgcttctcaaatgagcaactgcatcagaaccgttcctctgaggttactgtgctggactgacctgggtatcagtctcttcacaacctgagcttctgaaaaagtcatgaaatacctggacctgggattttctgtgatgggagagaattatttttgtgcagaaagactgtattgctacttgaagaacatggctttctgaggggatcagaaacatgtccatttcagaaaacattgaaagcataggaatcaaattttaggagaaaatagtacttacttgcttctacttcaacctgaagtagaaacagaaatgacaagttataaggaaatgcttctcaacacagccttcatgatccctgttcctggattgtggccccccaaattcatttgttttttgtgttgctgaaccaaatacatgttcgtgctcatttcattagctcactgctgggtcaagcctcaggtagagtctgaaacaaaagccatcattagcaaagacagggtaaaaggctttcacctgctgccagaactctctggatacctctgcacggtcattagattcctcctggtcccgcgctgtctgcattgtatttgaactcgcttgttaacctgcttcctgagctgtggttctgcttcagtcccaaatgaatcactggcaaggtagcacatcatttcatccaaagttcagtgtaatggcatctctgccctggacatgaaaccctgatcctttccatctgctactggaatgctgctgccttggcagtcttttatctgcttacctcagcccataaacatctctttctgatcatcaggtcacaagagtaggtgttagcttctaaccccgatgctgtcttaggcattccttatcaatagcttgttctttctttctgtaagattctggctgtgttccagttgagcagtggggtctttgaaggtaatccatatgattcctctttcattaggaggttgggtgagtgctgctgctctgagaagttgattttcacagtaggtgaccttatttgttgaccaggtacgtgcaggatctcaaggcccacattccttaagaatttgttgtctccatcccaggatcagaagtcttcattttcccccaccccaatcgccaccttctattttctgtcacagaacctatgagttctaggccagacctttgaccacaaaactgactgttgtttccctctggccatacggagatcattgctcagggaaaactttggctcaaatggtgaatttaaggtttctaaaggcactagatagacatatgattataaaagcaagagcttctgtacagtctggcctggaggatattgagaagcttttctctctggcctagtgtatttataagaactggatgtacttgatctcgggacctcaccaggcttggaaagtaagccaaccgaaggtaagtagaaatggaagatgtacacctggagccctctaaagggaagcaggctagggaaacgactgatgtctggaaatggcatgaaagtggcataatatgcagggctacctgggcagccagccgtctttatgttcatctggaacagcagtccctgtgtgatttggtcaaagcccctgagtcctagcctctaaccttctcttcccatatattcagctctacctacaaggactccaacactctgcacctccctacggagcgtttctcccctgtgcgccggttctcagatggggctgcgagcatccaggccttcaaagctcacctggaaaaaatgggcaacaacagcagcatcaaacagctgcagcaggtaatggaagaggtggcaggcatccctggaggagcatgggtgacagaggccaggattgcaggaggactggggtggtaaacgtaccccttttatgtcagcaacattgcagttttataggttaaaaaagtatagctttctgggccgggcgcagtggatcccgcctataatcccagcactttgggaggccaacgtgggaggattgcttgagccctgaagttctagaccagcctaggcaacatggcaaaccctttctcccccaaaagattaaaaattagcatagtcccagctactcctgaggctgagatgggaggatcacttgaacctgggaggtagaggttgtagtaagctaagatcacacccctgcactccatcctggcaacagaacgagactctgtcttaaaagaaaaagaaagtatagctttctaatgcactttctttactttgtgttatgtacagccctccccaggatcaaacttccttcccctgtgaagggactaaatttttctcctgtctctagttcattggaaaggaatttctgggcttgggtttctgtgggaaccaccagagaaggtgctactttttttttttttttttgagaccaagtcttgctctgtcacccaggctggagtgcagtggcacaatctcagctcactgcgtcgtccgcctcctgggttctagagattctcctgcctcagcatcctgggtagctgggactacaggcgtgcaccaccatgccagctaatttttgtatttttagtagagacagggtttcaccatgttgaccaggctatgtctcgaacttctgacctcaggtgatccgcccgtctcggcctcccaaagtgctaggattacaggcgtgagccaccttgcgcgcctggcactctgcgcatgatttaggatgctgggtcttgattaaacctgctgtacattgttaccacctggcattctctccaggtggtatggaacggcactctcagaggaaggaaatgtacctctatatgtttctgtactataaagattctataaagagccaatttcctttctgccttcctgatgaccaagcttccaatggcatgtgctttgtacacagatttcacattggacacttgtactcatacaaaggccatccttgatgttttccattcattcatacagaacaggatgtgaatctatttagtgcaccagatacttaggtaaatgagttaattgctcatcaaggacactgttctcttgcggctctttctgcccatgagagcttggaggcagatctgcatctgctgaaatcactgcatgaggcgggtctggctgcatcccatctgtattaactactttcccttcaggagtgtgagcagctgcagaagatgtacggggggcagattgatgaaagaaccctggagaagacccagcagcagcatatgttataccagcaggagcagcaccatcaaattctccagcaacaaattcaagtaggccctcactctttgctttctccaacttgtttggagtttgctttcaggctgatttgcccgtgcattttggaggagaccactcagtgcaaagtggatttgaggtctgtttatggttgacatgtttgagtaaaggtaatcagaccttctggtgaacaacaaaagcataaatctgagacacagatagttctttctgtttcttcccttcctgagaatagctctgagtaatcttcaagctcacaataatttttttcctttccccatatatgttttaggactctatctgtcctcctcagccatctccacctcttcaggctgcatgtgaaaatcagccagccctccttacccatcagctccagaggtatgagtcattttgtgttgtgcctaagccattgtctcgatagcatggtacccttggcttgactcactgggagatatggactgacttgagcattcatcttgcaagaatctatttgaaaaggagagaaaccactgtaaatttcaggagccttcttgaaatcccaacttcctgtgccacttcatttccttagccccatgagcaaagtaatctgatatctaatacaggagccagacataggcccacaatgaactctgccattttggctgagttcttttcaaacaagatgtagataggttttaaatacactgtggtggatggcttatgtatatttttctaacatgaggcttatcaaagtaaaaaaaaatagtttccactgatatatgttgtatggctgaaacttaagattgtactgtcaccttaggaagcttctttgtgtatctcttttgttatttttaaggttaaggattcagccttcaagcccaccccccaaccaccccaacaaccatctcttcaggcagcccagtaatagtcctccccccatgagcagtgccatgatccagcctcacggtgagtggagaggttcagaccaaacagttcattttatgccacatgggaaaaaatgatggtctcagttttgagcaccataaaccatttgaaaggcagaataacatagtattcaggggtatggactctagagccaagctgctttggtttgcatcctggttccatcagtttcttagctgtaaacccttgggtaagttaacttgacttcttgaattagtccatttcacactgctctaaagaactgactgagactgggtaattgataaaggaaagaggtttaattgactcacagttccacatggctggggaggcctcagaaaacttacaaccatggcagaaggagaagcaaggctcatcttccatggtggcaggagagagattgcacaggggaaagcgccagaaacttatcagacaaccagatctcaagaattccctcattatcatgagaacagcatggaggaaactgccccgtgatccagtcgcctcccaccaggtccctcccttgacacatggggactacacttcaagatgtgggtacacacagagccaaaccatattacttctcaaatgtcaactgaggataattatggtacagtatgtagatatacgtaaaacacttggaacagtctctggcacaaaatagttctcaataaaggtttactattattaatatttttaacaaaacctccagccctaccaaataaaaagcagctaccagaaccttccttatagacatgcctccgtttggctgtctactatacacgtgggcccctctcttgtgggtgtatagatgggagtgaagataagtataatgtgactgtgagtcttcagaggtcagccgtcttaggatctcttgagtaacactccacgagctacgtccctagtcagtctccctaggatccttgagaagagtctgaattggcctctaggctcttcctacttaaagtggggtcccccagccaccaatattgggagaaaaagtaagatctcaggtcgtattccagacctgttagagtctgttttttttttttttgagatggagtctccccctgtcacccaggctggagtgcagtggtatgatctcggctcactgcaacctccacctccgggttcaaatgattctcctgcctcagcctcccaagtagctgggattacaggcacccgccaccacacccagctaatttttgtatttttagtagagacagggtttcgccatggtggccaggctggtctcgaactcctgacctcatgatccgcccacctcggcctcccaagtgctgggattacaggtgtgagccaccacgcccggcctagagtctgtatttttaaccagatgccaggccatttgtgtgcacgtgaaagttcaagaagcactgcctagatccgagttaccccatgtaatccatggaccagcttttaagggaacttgttggaaacacaaattcttaggggcccatcctgacctactgaatcagagtttgaaacagaattatatagataggacccaggaatcttctgtttaacaagttctccagacttgtcctatgctcagtgcagtttgagaagcactgttctagctggtatgtcgtctgagtattctcattagctctcattacttctggctggctggtggcctgggcacttggtcactctgaggttcctttctctccaggggctgcatcttcttcccagtttcaaggcttaccttcccgcagtgcaatctttcagcagcaacctgagaactgttcctctcctcccaacgtggcactaacctgcttgggtatgcagcagcctgctcagtcacagcaggtcaccatccaagtccaagagcctgttgacatgctcagcaacatgccaggcacagctgcaggctccagtgggcgcggcatctccatcagccccagtgctggtcagatgcagatgcagcaccgtaccaacctgatggccaccctcagctatgggcaccgtcccttgtccaagcagctgagtgctgacagtgcagaggctcacaggtaagaccgcctaacgtcacccagccatctatgcatgggatccaggtgggaggaagccccttagcagagtgagagaaaaggagggaaggagaatgggtctgactaggctgtgctcttgtttcacgctttctaaaatcaggatgctgggtttggaatgaacttgtcagctttttattgacccagggttaaaattctaatgagactgaggtggaaaatgggaaagctaccttattatttgctaccttattatttgcttgcaaagaagaaaatggcctgttagaggaatgtataaaaattccagttccccttttcttgaagggagcatcttgaagttgcttccttcaaaatgagctagatctattacccacgcagtgccctcagtcccttggaggttactggacaagccagtaatggaataaatagggacaatgcatacatctgccacttctctgtcacaccacagttctctgtaccagtgggttctccctactgaggaggaggagctgttcccaggaagtctagtacttgttacatggatgtctggtactcccttttgtgtctgcagcttgaacgtgaatcggttctcccctgctaactacgaccaggcgcatttacacccccatctgttttcggaccagtcccggggttcccccagcagctacagcccttcaacaggagtggggttctctccaacccaagccctgaaagtccctccacttgaccaattccccaccttccctcccagtgcacatcagcagccgccacactataccacgtcggcactacagcaggccctgctgtctcccacgccgccagactatacaagacaccagcaggtaccccacatccttcaaggactgctttctccccggcattcgctcaccggccactcggacatccggctgcccccaacagagtttgcacagctcattaaaaggcagcagcaacaacggcagcagcagcagcaacagcagcaacagcaagaataccaggaactgttcaggcacatgaaccaaggggatgcggggagtctggctcccagccttgggggacagagcatgacagagcgccaggctttatcttatcaaaatgctgactcttatcaccatcacaccagcccccagcatctgctacaaatcagggcacaagaatgtgtctcacaggcttcctcacccaccccgccccacgggtatgctcaccagccggcactgatgcattcagagagcatggaggaggactgctcgtgtgagggggccaaggatggcttccaagacagtaagagttcaagtacattgaccaaaggttgccatgacagccctctgctcttgagtaccggtggacctggggaccctgaatctttgctaggaactgtgagtcatgcccaagaattggggatacatccctatggtcatcagccaactgctgcattcagtaaaaataaggtgcccagcagaggtaagtgtctcctcacagtggaagtcctgggccagtctgccctaatcaactgactcagtaatgttatcttttttcagctagtattctgtgttcctaagaaaaaaagaatttctgagcttcacgaccttcttggggagaagcatgtaggaagtgggtattggtgggcaaggggtccattttcaaaatcaaaggaccatgatacaaaattaacacttagtcaataagatagatgatccatttcccttattcataccacagtttcttggaatccagaaattcctgactgccatccaaacagctaactttaaacttgtgcaatagaaaaaaagtcagcccaacataatttagtgtaaatagtgtgggaacaagagtcagagcaccttaattctgctcttgcagctatcataaatacgataactttgtcatttaatccctctgattctgattttcctcatctgtgaagaaggtgttggaggaacaatggagtatcttacggtgtatctgtggagatgaaaacatgtatatatgtgtttgtttctacataatgtttgcatgagagagagaggcacattcagatcatctgaaatgtttgagttcagtgcataaatgtgaggtattattactctggtcgttttattagtgagctaaatgcagaatattacagcatcataaggggccccattatcatttcattttgtaccactttataattaatgagtatattcattatcattctgaaggagatcaggattgcaattagtaagttatacttagaaaatatagttccattagcatcacggcattcatcctagacaaaatcaggaatcttgcaatttaccactcctcaccattgccatccaagggaataaaaagcaatttatctgtaaactgtacaaccctgagactgagcagtttcttccatccttccctccccggaactacctgcatctcctgccctgtcatttaaagtcagtgctgaaaactcagccccagggggaattcggtcctgcagcacagagcagtagagaaggccttgctgtaaagcggtgtctgtgaaaacgccttggtggtgccaggttgtactcattatgcgctcttaggggggaattgttgcctgaaatgccaattcaatcctgaccttttgaacagatgggtgtcatccagctgagagattggctccagtgagatgtactgtgttcacctgtggctgctgtattcttagtagacataggagggtgggagctttcagaaccaggtcataggtggaatggttaacagacctgagggtgtttaggattgggaggaaaaactaagagaaacatcacgcttgttagatggaagaagggattagatttttctgggttcatattatggggcagaaccaagatcaagatagaagttgcagcaaatttcaacaccctgtggaagacctttataagaactctccagaacaggctgccttagcagcctgggagctttctaacagaggtgggataatggtatggggatgttgtggaaaagattcccctgcaaatggaagcttccagcagattagcacactatagttggcatgaaaaggagatgagctcacgtttcttttttttttttttttttgagacggagtcttgctctgtcacccaggctggagtgcagtggtgcgatctcagctcactgcaagctctgcctacaatgctcacgccattctcctgcctcagcctcccgagtagctgggactacatgtgcccgccaccacgccccgctaattttttgtatttttagtagagacagggtttcaccgtgttagccaggatggtctcgatctcctgacctcgtgatccgcacgccttggcctcccaaagtgctgggattacaggcatgagccaccgcgcccggctgagctcacatgtgccaggcaccaaatgctgttcacatacggattcatttaatccttacaacaaccctacaaccctagaataaccaactcttattcccatttaccagtgaaacagcggaggcacagagattaagtaacttgtccccaaagtcaagaggtagtcaggggcagctgaacataagagtactcacactagctgtcactgacacgagagatgctcaccgagcaagtcccgggtgtgcagggcactgaggaaggagcatagctgcagcaaacagtgctgctgccctccacccctgccccaggctgagttaccgtgtactttcaatacttcctgaaatgtttttcttcaaaaattattttctctagtttctctttaccttccttcctgtgtgacttgtgtgtgtagaaagtctggagagcataattccccattgtcccctgattgtcagaggaccccttcttcggcaggcacgctagtctgttgagtacccactgttggtgcaagtgctgtgggcgcaccagaggagggagagattacttcaatccaaggaacaacgtaggtttccagcaataagtagcctgtgggttgggtcctggtggatgaagaaggtttgccatttggatctagaggagaagcaagagaaaagaacaatgggtgagactgtctcaaggaattttccaaggacagcagcaggcttggctggtttgaagtacagtgtacatgaaggcattagtagaagctaaggacagaggttttctaaaatgcatcgtctagattcagctgtactgtgaaaaaaactcaagtttttttttttttttttttggcagagtctcacactgtcacccatgctggagtgcagtggcacgatctcggctcactgcaacctacccctcctgggttcaagcgattctcctgcctcagcctcctaagtagctaggattacaggtgtgcactaccgcacccggctaatttttttttgtagagacggggtttcaccatgttggccaggctggtcttgaactcctgacttcaagtgatccaaccacctcggcctcacaaagtgctgggattacaggcatgagccaccatgcctggctttcaggtttcttttaaaaactccagagcttacatttttactttactgaaaaaatcatcagataatttgctgttcacttctgtcacgaaaggcttataatgctgtgcccccaccactctgcaggcaagtgggggagctcactcttctcaacctttttgccaggaaggaatgcctgctgtttcttttaatggtccctccatctcaactgtgttgcacaagactctactgtaggtgctgtgagaatgcagagatgaaaggataacctgtcctcagggagcttctactctactaggggatgtaaaacaagctcataaacagctttgctatgaagtgctaggtactgagtgctgcaagaagtatcactgagaagagcagagctagtgtgatcttcttagcatttcttaagggtagatgaacagggattgttggtgttatttagttactttttgagtcagggtcttgctctgtcacctaggctagagtgcagtggtgcaaccacggttcactgcagcctcgacctcctgggctcaagcagtcctcccacctcaacctcctgagcagctgggactacaggcgcgtgccactacacccagctaattttttttttcctttggtatagatggggtcttgctatgtcgccggggctgatcttgaactcctgggctcaaacaatcctcccttcttggcctcccaaaatgctggtattacaggcatgagccaccacacccagccatattggtattagtaaaggaaaattagatgccatcatatcagtgtccatggttacctatttccttgatggcgatttgccaccagccagtatgaggccaggcactgtgagagcactaagcaggcagcatgccaaaggtttcttcccaatttgtagaagtgtcaggatttcacatgccccatgctgtccgtaatctccctgcctgccaccctagaaggaaaaacaaggtttgtctttcttctatagtggtacacacacttgatctttttgactttgcaaataaacacagcagcataaccaatctacaccatgagattaccaactggaactcacaaagaaaaccacatcctcttctctgagctcagtcagcctcagctttattactcaggcctcatagagcagtaaaatgctgacagagtgggaggggttaccccagaacctttaaggggagtatgcagtcacgttattgctcccattttctctcaaaacccagtaagtgagtcaggacgagtcaacattgacagattcaatagagaattgtgcaggttgccccaaagttccccgggaaggtgggtggcgtgcattgtgtccatttgtgcacttttccccttgtgtgatcggacgatcatcccacctctgcactctcttagctttagtttgataaatattcgagcatgtagctcttgggaaccatctttcctccatgactttggtagctgctgaattggcataaagggttgccaaagatttgatcctgaatgtcatgttccttgggcagtgggttagtctgtttgtaccccccaaaatggtcgatagggtcttatttatagagtgtcacaaaggacttctagactcagggtcagcattcttaccaaaaatcagacttgacttatttggtcttttacagttgattaaagactctttcacatgtgttgtcttttcgagcccccaaacaaccgtcatttttcagatcaggaaccttgaggagaagctgaaagatttgccaacactttgctggtgagggagctgggtcctgacttcaagttttctgatcccctggtcatgtattttttcctttacgcctccttgcccactctgcaccctccaagcacagctgccaagtgaaagatgctagcccttccaggtctttgacctactgatgatactgaaacttgagcagacagagccctggggtatcccctgactcctattaatactctttttcatctggcttttaactgacatttgtctgtcctgaatcagaggcttctcctggaaattaaagtttccctgagtcatttgttcatttacatatgggtatattgtccctcataattctgcaagcagggttctgtgattaaatcaatttccttgtttgtttttgtcagctgactcagcacgtccttatgcactcagaaataacatctctaaactgaatataaatcatgctagactttattgagcctttacagtgtagtaacctctatgaagcactccacacccatggagtcagtccagttgtacagataactaagacccagcaaagcaagataacttgcccgagctcctgctcctcaggaagcagctaagccaggattcacggccaactcttcctgaccccagaacttgtgctcatgacccttgtgctcaactccagcttggctgagggatgagctctgggctgggagtcaggaaggccccctacatgatttgtcaggtggttgcttgctctgtcttggtgcctacaggcatcagacctgaaggcggggaagacagcagacaaggcagagcccaaaggagggtgggtgttttggtttgcagaggccccattctcagggataaaaacaagtctgagagagggaaggaaaagagccttaaaagacacagcaaacaaaccaaaacactgaggcctccagaagaggcaggaaggctccaaccaggactatatacattttgttagctttgctgtttcctcatggttagtaatgatgttttaaaaatctttaaacaggagagcgctcatgtttgtccttgcggagagcaaagagatgcaactgatgagatttgcatccaactatataatcaggcttaaaggaaaaaaggaccccgaggaattgagtggatgatgttagttatcaaagaagacaatataggtttttgaaaaagtaagaagcggctgctcgcattgcttcttggcaaagcagacagaatcaccatttcctcactcccacacaaccatgttgccccacttcctgccagtggtttttggttggccctggcgccaacatgcgagcagtgcccactgagaggaattgggcagagtgggtaggacgggcgggctaatcccacagagcaagtcctggtgtaggttttcttttatcttctctctgctggcttttagctttctgtagcaaaatagttggcttctggctgttccttttacctctttgctcagagaactttcaaaagatttctcacttgccatcatctttggtagctgggaagctccctcctctaatttttctccagaatgtcttgcattactagcaatgggcatgtcagttagctcccctccctttccatcctgcctctgcccctaagtcccagcctaaccttaatcattatagaaaaccattgaaatacagagacctgaaatcctttacccaacattcaagaagtatgctttactttcattatttaaatagatcattggaatggcacagttagcattacagctgtgtttgctattaagagattttgttttaaacttagtcccaccaagagtcagttcatccaagataagctcagtagtttccaagaagctttaactcagaaaaccaaccaagcaaacacaacttattttcaagtcccaggcttttaaagactgaagtcaaaagtgctaccaggaggatcctgtcaacataggtgtggctttgatagtcttcttgactatccttgatcaagaagaaatactcattcctttttctctccaattctagtccatagaatggtatgctctgacaggatagtaacccatattaagagagtatttatttttattattcttttttgagatagagtctcactctgttgcccaggctggagtgcagtggcatggtcttggctcactgcaatctctgccttctgagttcaagcaattcccctgcctcagcctcctgagtagctgggactacaggtgcacaccaccacacccagctaatttttgtaattttagtagaggtggggtttcaccatgttggccaggctggtctcaaactcctgacctcaggtgatccacccgccccggcctcccaaaatgctgggattacacgcacccggcctaaagagcatttactgacatcagtgaaagagatcataatactgggtataggacaatgttctagaacactgaagattcacagacatacatgagatatagttcttgcctgcaaagaatttatagtctaatgtgaatgattaagtacataattgaacatggtaccaaggataatgttagagcaatcagagacaaagtcttttgaagtttaaaggaagagatgatctatttctgtttgaaaggaaaagtttaataaagacaatagcatatgataatggatgtagaatgatgagttgctttggattggcaggagtgaaggcagaagaatcagttatttgcagatagaaggaacagtgagggcaaatgcatagaattgtgcatagatggggaacagttaagtggtcccatttgactagagcttagaatgtatggagaggggaatatgagacactgattggaagatagcccagggcagtgttgtaaaatgaaagtgaatggactacagaacggttggtctttgtagggtagtagtaggggattggttatgaggctagcataataatccaggcaagaggtaatcaggtttccatgagattggcaacaaagggactgaagtgaccagcattgcacagttagattcagcaccaggagtaaggaatcaatagtggccccaagagcttatgcctggaagatttggaaaatgaggcatcaaaacgacaatgtctgaaggagtagcaggttatgggggaagtggatgggtttggaattggacatggtaagtgttacatgctggttagatatccagggaaagatacctagtaagtagctggaagtatggatctggggcttaaaggagcacttcagtaattctttacataaaggcagtacagccatgaaaatagatgatgttgccagagtaagtgtggggagagagaaggtcaaggacaaaaatgtggagagtacttgcttagaaagggtggaggggccatcaaaggagtcagaagcagcagttagagaagtagaaagaggagagtagcagcgtggtacactgaggtcaccgggggaggagagaggacgcagccagccacagaacagatgcatcctctagggctagagggtcctgaaagctccgagagtaattctcatgtgcatttaggtttgggaatagatcactgttaattcaacagagaaatgaaagaagagaaggttcggtggggtccagccatgccctgttacgtggaattttttccctaagggtgtggtcccctcccctacagctcgtcttttggagggctggtccaggctcctctaagccatgacgccggctgaggatcagcggttggtgtacatgatctcctcagccttgcccgttgtcccttgcaagacatttcttggatgggagtttccagtgctgggagaagttccgccccactgactctattctgctgtgtctcctcagagcctgtcatagggaactgcatggatagaagttctccaggacaagcagtggagctgccggatcacaatgggctcgggtacccagcacgcccctccgtccatgagcaccacaggccccgggccctccagagacaccacacgatccagaacagcgacgatgcttatgtatgttggtcccacctgctgcacagaggtggatcctcccagtcccagccttgaaacagagtatagtgatgtggggtagcctctcttggccgctctcctcagtcagcattcagcctttctggaaacggtggggagcatttctttttttttcttttttgagatggagtctcactctgtcgcccaggcgggaggacagtggcgcgatatcagctcactgcaacttctacctccccagttcaagtgacttttgtgcctcagcttcctgagtagctgggactacaggtgcctgccaccacacctggctaatttttgtatttttagtaggcatggggttttaccatgttggctaggctggtctcgaattcctgagctcaggcaattcgcctaccttaagagcattttctttgagtcaccctaacagaccaaaccttaattcaagtagaatctatgctccaaattttagaccaaagaatcagaaatagttgccatctgttccctgtagttttggttattaaacctcttctcagtctaaactcaggccccagcaaatgagcccataggcttctggttatttttcagcagctacattgagcttactcagatcaggggagctggtgggcctcagcaaagttttgttttcctagggtggtgctagtctagtagctagccacatgtggctattcaaatctaaaccaattaaaattaaaaacaatttaaaattcagttcctcagtcacaccagttacactttattttttattattattattttttgagacagagtcttgctctgtcacccaggttggagtgcagtggcgcaatctcggctcactgcaagctccgcctcccgggttcacgccattctcctgcctcaacctcccgagtagctgggactacaggcgcccgccacctaattttttgtatttttagtagagctaaatttttttagcccagctaatttttcgtatttttagtagagatggggtttcaccgtgttagccaggatggtctcgatctcctgacctcatgatccacccgcctcagcctcccaaagtgctgggattacaggcatgagccaccgtgcccagcccagtcacactttaagtgctcagtagccacttgtggctactggttaccatattggacaggacagagaacatttccatcactgcagagtgtgactggacggtgctgtcctaagacaaagtcccagtggagatggggataggtcagaaacctggttttagaaggccatgtaggtatcaagatgtcaccaccagctgagatttgccacatccgccccaccctcagccccccgactgggcagagccaagcagcttcccacactgtcgctgtggagcaccccctttgggtggtgctttagaggaaggagtctggagtggggccccgggctgtcttttgcctgggctccttcagaaggaccagctgtctctaggggttgcctgagagtggtgtcttgtgtgcttatttcttctcttaactgttttctgcaggtacagctggataacttgccaggaatgagtctcgtggctgggaaagcacttagctctgcccggatgtcggatgcagttctcagtcagtcttcgctcatgggcagccagcagtttcaggatggggaaaatgagggtgaggagccttatgcatggggcactccagagaagttcctggaggggcctccctccatcttccgtaactgctcctctcttcgtaggaagagctcatggggaggtagagccacagcatcccacaggttctggacacagcccctttccccactggtcttccctgagtgtgggtgtgtaaaggaggtgtggcttctggccagatggcacagggctctcccattcctgtctctcatctctgtgatgatatgccttcaatcactttttccagttctgcttagagggcatcaggtcctaatggcacatttctacctcttcttggagccagtcaagggagggtgtcataacaaataataggcgtaggccttgggcggggcaggtctgccaccagtcccaaggctgtccttttcaggctctgcaggtgaggcacttggctttctggaccccgagatcctcatctgtaaagtggcaaaaacgatagagcctttatcctacattgtgccctgagggctggctggcttagtgagtatcaagtgcttagcacagtgtctggaagacagacagtgcccaggaatgggtgcctgcaggcagtaaaattattctccctttcactctttaagaggtgatcctttctgaaggagtcctctatcttctctcacactacagtagttgatcttacctaaggatgggaaagggtaaaggaaaagggaaaaaagcagaacaggtagaggagaatataggaagaatcttggcccccgcccatcgtcactcaacaccttgagggcctgctgtgagctagaattcagggctgggagtcaggctgtgggatgctcgacaggttgccttcaattcctcctctctctcccccttgctctcctagtcccccagttccctgccaacctcatacgttctttttggtcttgcagaatgtggggcaagcctgggaggtcatgagcacccagacctgagtgatggcagccagcatttaaactcctcttgctatccatctacgtgtattacagacattctgctcagctacaagcaccccgaagtctccttcagcatggagcaggcaggcgtgtaacaagaaacagagagtgagtgtcaccctggccagagccaaaccagccctgtggcccagtgcctgctcccaatcccatcaggagcttcagcccatgtgttgtggtggccagtgcagtcgacagtaccacgcctcccctcgtggccttcacagtttcttgcttttcattaacgacgctgctagttttagggcgcgaggtaggggtgggggtgtgcagaagaaatgctaaacacagtctcttggttgggttatgggaataagacacaagactcgccgtgtgttacaggtgctctagccttcatagcgacagaagtgagctacggctccagaggatgcaggtgacctccggtcagcataatgaggaaaggaggaagtccttaaactcagtcctaaaagacaaaacctggcaggaaaatatgtccagccatattttttaaggccatacagaagcaagtggcaggatattccagattagggaaatgtgtgatgagaggcccatggtagaaagaatggggaaattggcttgtttggctggagtaatgcaaagagtacacagcaggcaccattggttgtatctggaaaatccttgacagaagaggcctgatgaaagggaagccacttggcaaatccacatcagagcctcagtatggcaagctacctgaacacctgagggaaagtaaacccgttgcattttttaaaaggttttaaatggaatatttgagcctttctcttttcaaactaattctcctctgtgtctgctttattccaggttttgtgtacagcttgggaatgaaaaggttgattgtaaacccacagtatctagcagcgttgtgccaaattgcccttgtgtttctctccacccaaaatatcacagctgctttcctcacatttggttcatccgtgtgctgttcttttgggttctgagagggttttgccatgtttgcttgtatgaccaagtcaccaaggaaataaacaggaaggaaatccatgttctccatcttttgtgaaagtatatttgagttggtggttttttgttttgtttgggggtttgtgttttgttttgtttttggtatgttttcttccagaggtgatatactttcttttttttcttcctttcttttttttctttcgttccttttttgaaacaggagagcaaagcagttagagttcagaggccagcggcctcagggccactccctccctagccttcatcagcagagcaccctccatccccctgcattgctcttctgtgaaagcaaatactaaaggatgccatcctctggaatcctaatggcaggcaaagggagagaggaagggtgacggcttctggcacttagaaaacaaaaagaacaaaaaaagagaaacccccaagcctggaacgcagagaggtctttactgctgggatccacggaaaacatgtctgtcctagccaagatcatatgaagagtttggcacggaggctgagaatgacctggcatagatggtttgccagttaggatgtctcaatttgagcctttgcttttggtggataactcagctcccctcttgtaacctggaaagttggttgcctttatcatcctgctggttttatccatggactgaacacccaacagcagtgcactatgctttctatggcatctttcattctcattttatattgtgctataaaaaggattgtttctccatatatatattatatatgtgtgtatatatataatataatatatgtgtatatatatattatatatataatatataatatatatattatatatatattatatatataatatatatataaaatatatatatatatgctctcctctttcagcctctttgtcacagggaagaagtgtaggaggttgccttgggccctgcctctctcctaacctcctcttccccactgggtaccctcagcccctatattttaattcttgatcatgtagaaattgtttttggtaaatgttgatattattgttattatcattattaataaataaagagaaaaggaatttttgtttaaatgagaaatgtttaaccagattctgttctatttgaattgtgacttgcaccttttgttcaaagtatttcctttaggcattgtaattgtgaacagctcttacttgtgccagtgacagatgcagtggtctcctttccccagttgaagcagtgcatacgcagtagctattatttgtgttatctttatttctcttcattgttagaaaccaaagtcttctctgctggctggggctgagagagggtctgggttatctccttctgatcttcaaaacaagagagagaccttgaatacactgactcttccaccctttttttttctgggaaaggagagcaagaggtcccgagtcccctcctagtctttcatcctgaatttgcacagaggaaagcgggtgcccggcatggccatcctgatgttgctggcgggatccccatgcaccttgtccttctccactgatactggcagctcggctcctggacccaagatcccttgagtggaattctgcagtgcaagagcccttcgtgggagctgtcccatgtttccatggtccccagtctcccctccacttggtggggtcaccaactactcaccagaagggggcttaccaagaaagccctaaaaagctgttgacttatctgcgcttgttccaactcttatgcccccaacctgccctaccaccaccacgcgctcagcctgatgtgtttacatggtactgtatgtatgggagagcagactgcaccctccagcaacaacagatgaaagccagtgagcctactaaccgtgccatcttgcaaactacactttaaaaaaaactcattgctttgtattgtagtaaccaatatgtgcagtatacgttgaatgtatatgaacatactttcctatttctgttctttgaaaatgtcagaaatatttttttctttctcattttatgttgaactaaaaaggattaaaaaaaaaatctccagactcaagttgctaagaccttttgtcctgccttttgtccttccttttgtgaggcacttacttacaacttggttacttagttggacagcaggaagttgtgtagataggagcctgattgtgttcttaggctgatagattatttgcctgtggtttggagtctagttggaagaagcctcaggtaggtgggagctggagcagtggaggctggagaggtctcccaggctaagggtggggctttgagtgacttaagaaactcgcattctctagaagcctgaactctgcttcacactgtgtccctgggcacccagctcggactctgccctgtcagaagggagcatttgaatttgctgggccaggtggaaaacagcttccttgaaagggcacttttgaagagtacagggaaggatccttaaagagtggacacaggctggacccttcatgacgtgacccccattggccgagtgaaaggatagccaaataagtatttggaaagaaagggagggccctggcatggctcacgcctgtaaatccagcacttctggaggccgatgggggtggatcatctgaagtcaggagtttgagaccagcctggccaatgtggcaaaaccccgtgtctactaaaaatacaaaaattagccaggtgtggtggcaggtgcctgtagtccctgctactcaggaggctgagacaggagaatggcttgaacccaggaggcagaggttactgcagcaagccaagattgcaccactgcactctagcctgggtgacagcgggatactacatctcaaaaaaaaaaaaaaaagcggagcgggggtggaattttcctatagttttctcctttatcccacacctgaactccaaagggcagggtagagtttccagcaagtttccaggcatggctaagagacaggtggttgaaggtcttctatgaagaaagcttactgaagctggaaagaccatctgagttcacagaaggaagaatgagaggagggaatttagaaagccttccaagctgggcatggtggcgtgcgcctgtaatcccagctgctcaggaggctgaggcaggagaattaggtaaacccaggagttggagtccaacctgggcaacatagcaagacccccacctctacaaaaaataaccaggcttggtggcacatgcctgtagtcccagctgctcaggaggctgaggctgaaggatcatgtgagcctaggagtttgaggctgcagtgagctgtgatcgcaccactgcactcctgcaaagagaaaagaaagatttcaagtccatgagggcggctagaaagttgctgtagggccatttagattagagaagaaaagagccttctcaagaagggccttctggccgggcgcggtggctcacgcctgtaatcccagcactttgggaggccgaggcgggtggatcacgaggtcaggagatcgagaccatcccggctaaaacggtgaaaccccgtctctactaaaaatacaaaaaattagccgggcgtagtggcgggcgcctgtagtcccagctacttgggaggctgaggcaggagaatggcgtgaacccgggaggcggagcttgcagtgagccgagatcccgccactgcactccagcctgggcgacagagcgagactccgtctcaaaaaaaaaaaaaaaaaaagaagggccttctaaaactcctctgagtctgtatacgctgtcatgcaagactaggtgagtctctagaatcaaacagtgataatacccagatgccttccagcaaattgtagcacctgttgcaataggtgccactccctcctaaaatcagccagggtgcctttggaccagaggtagggtgagcttttgtaggaagcagggcactggctcctggatacagactggagagcttagctccagaaaacaggagccatgttgacagaaaaccgtgctctacacagttttctttctgactttgtgccagcccccaccccaccccaactgcaaagatcaagaactcagagggctactgtgcttccctcctgctgatcaaagatgagctctgtcctggccttagtcttttccaagcaggagggcaggagagaatcttgcatagctggctacggtgccccacccaagggtctaacttggggctctatcacaaaagctgcagcaaaattgccaaaagtaggaactactgggggtgggggtcctgtctcccctgctcagtcaccacctcccctccctaactctcattctggctcataccacgtgctcccagaagaaacgttctgagcaggggctggtatgagactgcctcccctcccaggacccactcctccctatgaccaggctggtgaccctccctctagggtgccagtgccattcactgagcagatgtttggcaggtgtctgttatgtgccagacctagcaggggacagagtcctcccgatacagatggaccagtatgtttggacataaattgtgaaaggagttgctaatctttctgtgcaaaatccactcttgcggtcaccgccaacactcctacacatgtcagggcatccagggccaggacttggtaaccctgttcaggagcagtcgctctggagactcccaagacgagggaaagaaatgggtggaaacaggggcctacactgtgggccccgcagccaccaaacagtccaacccgtggccactgagtgccttgaacaatgcctggctggaccctgagtctgagtgtgtcatcaacccagtttgttattgtcgttgttgttgttatgtatttttccatcagctctgtccagaaagacctccttcctttccaaaatattagtaaagggggcttagactagtttaagccaaataccttgcaataaaatggagtagccaccctggtgaataagtatatttagaaaaggaaactgcctgcttggtaagatgctgttcaacagcaccccctatcctgatgcctcgcagtccctgagccaggaaactgagaagtccctgatcagactgcaaaggctgcaggctccgcaagggtgcaaggccaccctcaaagaactagaagccaggcctcccgattcccacccctgccagcgctaaatagtaaccgctgaaggatgcagggcagctgtgagctgcagttttcccacaggcaaaaatcacaagggtaaaatctggcctccagccttacagggatattctaagttgtgaaagtgctttggccacaaagaactgcgcaaatgttaaatactaggtttagccataacaatcattttagtaacaaaccaaagagaagggtgaaacactggcaagtatcttggagtccaaccagtaagcttctgagattcccccatgtgctgactgggacaaactctaccccccaaaagaaaagacgctctcttggcccgagacacctgtgagctgtcccagcaggggaccagccaccttcccactttctaaagctacagacagctgggatggtcaagtaggcagcccaggctgatggctcaccaaggccacctccctgtctacacagtcccatagacatctggggccacttcagtcctagaaaagatgttccatatctcagcaactgcaagtcaaggacaagcagagagatgtgggactgctgccttcatgcctgctgcagaagctgaggtctcagatctgataaagcaagtgtagtgggaataagggaatacattaccagaaactgggattctagaaaacagaatagttactgtttactaagtgctaggtacctttctaacagttttgcatatatgttcaaagttcatgcttaaaacgatacaaatttattatcttacagttatggaggacagaagtccaaaatgggtcatactgggctaaaatcatggtggcagcagagctgtgctcctggaggctgcagggaaaaatcctttgccttctccagcttctagggaagggttgctcatgtccctcagctcatggcccccttccagcagtcacatgagtctgatctccactgccatcctcacatctctttctctgactctgaggccactgcctccctcttgtataattaaggacccctgtgatgacaatgggcccacctggagaatccaggccaaccaccccatctccaggtccttaatcacactagcaaaatctttttttgccatggaaggtagcaaagccacaggttccagggatgaggctgtggacatctttggggagcgttattctgcttgccacacagtaacccctgccataactcagggcgatggcatattctatcattatcttcaatcagaaactgatgtgtggggaggtgatgtatcataactcatccagggtcaggcagctggatttgaacctgcctgacccttagatttgaggttttctggctccagaatcttctctgaagtgaaaggcatgaggccgaccactccctgatctggtaaacagagatgtcagcctggtttctagtgttagggagtttcctggagtgatggtacagggtacatttctgccctgcatcccaagtccagagactgggttctaggtccagcctttcttctaactccctgagagatgacagcctctgggcaaagtccctctgtgctcttcagtctcttcatctgtgagatggtggcatggggagaggctggagtgatgtcacagttcctctcagcctgcatcacaggctctaggactcaggtcctatcagtaacctgctgggggaggtctgggccttccaggagaaacctgacaagatggtgctgcaaacaccaacggacacacagcactttacattcacaggctgtctcaggggcctccaacaaccctgaccattcttgccccattttgcagatagaaaaccgaggctcagagagattatataacttgcccacgatcttcctccagcaagatggaggccaagtgaaatgagaaagcaggtctcctgccacttcctttgcccagaggtcttctccccacaccagggcttcccaagggctgagatccagtcacacctgtgcgtgatcaaatataagtgtgaacaatgcaaagggagacgtcttcaatctaaggggcttcaattctgtaatgtaattctgagattatgcccttttttgttaaagcctttcctttttgaagtgatggtcactgtagatggtgagggttttttggaggcggacaatatctttacatgacaaaattaaaagttggcagctccgaattgatctctggagtgttttgaaatgcaagaggtctccgaaacctcagtctgggagccacggagggctctcccctctccccaggtttaccagtttgggaggcttggagagaggcctggaggacctgctggggactaaagaagagcactggtgggaggacagggcgggggaagggggaggggagtgaagtagtctccctggaatgctggtggtgggggaggcagtctccttggtggaggagtcccagcgtccctcccctcccctcctctgccaacacaatggacaatggcaactgcccacacactcccatggaggggaaggggatgagtgcagggaaccccgaccccacccgggagacctgcaagcctgcagacactcccctcccgcccccactgaacccttgacccctgccctgcagcccccgcagcttgctgtttgcccactctatttgcccagccccagggacagagctgatccttgaactcttaagttccacattgccaggaccagtgagcagcaacagggccggggctgggcttatcagcctcccagcccagaccctggctgcagacataaataggccctgcaagagctggctgcttagagactgcgagaaggaggtgcgtcctgctgcctgccccggtcactctggctccccagctcaaggttcaggccttgccccaggccgggcctctgggtacctgaggtcttctcccgctctgtgcccttctcctcacctggctgcaatgagtgggggagcacggggcttctgcatgctgaaggcaccccactcagccaggcccttcttctcctccaggtcccccacggcccttcaggatgaaagctgcggtgctgaccttggccgtgctcttcctgacgggtaggtgtcccctaacctagggagccaaccatcggggggccttctccctaaatccccgtggcccaccctcctgggcagaggcagcaggtttctcactggccccctctcccccacctccaagcttggcctttcggctcagatctcagcccacagctggcctgatctgggtctcccctcccaccctcagggagccaggctcggcatttctggcagcaagatgaacccccccagagcccctgggatcgagtgaaggacctggccactgtgtacgtggatgtgctcaaagacagcggcagagactatgtgtcccagtttgaaggctccgccttgggaaaacagctaaagtaaggacccagcctggggttgagggcaggggcagggggcagaggcctgtgggatgatgttgaagccagactggccgagtcctcacctaatatctgatgagctgggccccacagatggtctggatggagaaaccggaatgggatctccaggcagggtcacagcccatgtcccctgcaaaggacagaccagggctgcccgatgcgtgatcacagagccacattgtgcctgcaagtgtagcaagcccctttcccttcttcaccacctcctctgctcctgcccagcaagactgtgggctgtcttcggagaggagaatgcgctggaggcatagaagcgaggtccttcaagggcccactttggagaccaacgtaactgggcaccagtcccagctctgtctcctttttagctcctctctgtgcctcggtccagctgcacaacggggcatggcctggcggggcaggggtgttggttgagagtgtactggaaatgctaggccactgcacctccgcggacaggtgtcacccagggctcacccctgataggctggggcgctgggaggccagccctcaacccttctgtctcaccctccagcctaaagctccttgacaactgggacagcgtgacctccaccttcagcaagctgcgcgaacagctcggccctgtgacccaggagttctgggataacctggaaaaggagacagagggcctgaggcaggagatgagcaaggatctggaggaggtgaaggccaaggtgcagccctacctggacgacttccagaagaagtggcaggaggagatggagctctaccgccagaaggtggagccgctgcgcgcagagctccaagagggcgcgcgccagaagctgcacgagctgcaagagaagctgagcccactgggcgaggagatgcgcgaccgcgcgcgcgcccatgtggacgcgctgcgcacgcatctggccccctacagcgacgagctgcgccagcgcttggccgcgcgccttgaggctctcaaggagaacggcggcgccagactggccgagtaccacgccaaggccaccgagcatctgagcacgctcagcgagaaggccaagcccgcgctcgaggacctccgccaaggcctgctgcccgtgctggagagcttcaaggtcagcttcctgagcgctctcgaggagtacactaagaagctcaacacccagtgaggcgcccgccgccgccccccttcccggtgctcagaataaacgtttccaaagtgggaagcagcttctttcttttgggagaatagaggggggtgcggggacatccgggggagcccgggtggggcctttggccctggagcagggacttcctgccggatctcaacaactccgtgcccagactggacgtcttagggccaagatcgacgttggaggacctgctggacgcctggctgcttacgagtgagggagtagagtctgccttagcaaggctcaagtagaaaggaagtcacagcggaccaggcaaagccacagacaatccaaggccaggtgccctgaaaggggctcaaacaaggcctgcagccctgtctgaggcgggccaggaaacagggttgctttagctgggagcagtgggttccccgtccccagaggtgtgtccgtatagagccttctccagcccagccgctgtcagcggggcgggacggagcggggcggcctcagggagccagccactgggattggggtttggtcccgggtgcaagtgaagcgcttggagtttgcgcctgtcctcctttactaattcaaaaacctctcaaacagacacttcccttttcttctcacaaggccagtatccccctcccactactcccatcccgcccagaaacagccgcggcttcctcaggcacagcagtggaagccagtcctccaccccctgcggctccatgccatgccaccccctctttctgccagccctggcagaagctggcctgagtaagaaaattcaccaccacctcttgcaggtacatttttatttccaagatgctctcatatctgtgctctcactgcatcctcccttccccacatcctggctagattgccatcagacgcagagcatggatgaggacactgaagcctggacctgtgacgtcgcttgcccagtgaacagcaggatgggctaggcagcgctttttagaccctgcacccctggccatccatgattattgaaaagagtgtgcgggtcgggtgcggtggctcaagcctgtaatcccagcactttgggaggctgaggtgggcgtatcacttcaggccaggagtttgagaccagcctggccaatatggtgaaaccctgtctctactaaaaatacaaaaaaaatcagctgggcatggtggcttgcacccgtaatcccagctactaggaaggctgaggcaggagaatcgcttgaacctgggaggcagaggtcacagtgagccgaaatcatgccactgcactccagcctgggcgacggagcaagactccagctaaaaaaaaaaaaaaaaaaaaaaaagagtgtgtggcctggcactcaagttcacatgggtgtgcaggcatgcctgtgtattctcacatgacctccctgctcacggtccctccttgcactcatgtctgaatgtccccgcgtgcacgcacatggcttcacagatctgggcagtgccttccctaccctctctctgcagggccttttgccccctcatgcaggcccctggataatcggccccatccccatgtccccatctccagtgtatcttagctaccctaggtaaaggagtgggctttttagttcctaaccttccagagctacaacagcagtcatccagccaggtctgggtgggaacattttctagatacgggtgctgagatctctcagcccagagagaagccctggggaattttcagagagaaagcagtctccaggtggggctggatgtactgatgccactgagatctgtaaaggagtccctaacacctgacataggagtgacaaaactgttttctgcaccaactgagcagaatacacgcagctgacctgggctcaaggtctggccctgccacgtgctggctctgtgatgctggccaagtgccttcgcctctccgggccacagttttttgatctgaagagtggagccctactcaagccatctgcagctctcgggctctctgacctgacatctttcgggtggtggggacacaaaggaagcagcctctattgggagaccttgtgcttctttttggtcccaggacactgccccccaccactccagtccgggtcccaagggcccagtcagctcaactgtaatcatgacaacattgatcaagcatctttacgtgcaggtgctgtgccaaacggttcgaacgctctctcatttcaatctcacggcaaacctacggtggagggggtacggttgtatccactttacatgtaagaaactgaggctgatatcaagtggtggagccaagaatagtgcctcgttgcatcttactccaacctctagcccatccggcctcctcccttcacgtgcgcctaagagggctaggtggcctggataggggaggtcagctccacagttttgag

SEQ ID NO: 859 - DNA, 4500 bp, Homo sapiens
aggttgctatcaagatcatagataagacccagctggatgaagaaaacttgaagaagattttccgggaagttcaaattatgaagatgctttgccacccccatatcatcaggctctaccaggttatggagacagaacggatgatttatctggtgacagaatatgctagtggaggggaaatatttgaccacctggtggcccatggtagaatggcagaaaaggaggcacgtcggaagttcaaacagatcgtcacagctgtctatttttgtcactgtcggaacattgttcatcgtgatttaaaagctgaaaatttacttctggatgccaatctgaatatcaaaatagcagattttggtttcagtaacctcttcactcctgggcagctgctgaagacctggtgtggcagccctccctatgctgcacctgaactctttgaaggaaaagaatatgatgggcccaaagtggacatctggagccttggagttgtcctctacgtgcttgtgtgcggtgccctgccatttgatggaagcacactgcagaatctgcgggcccgcgtgctgagtggaaagttccgcatcccattttttatgtccacagaatgtgagcatttgatccgccatatgttggtgttagatcccaataagcgcctctccatggagcagatctgcaagcacaagtggatgaagctaggggacgccgatcccaactttgacaggttaatagctgaatgccaacaactaaaggaagaaagacaggtggaccccctgaatgaggatgtcctcttggccatggaggacatgggactggacaaagaacagacactgcaggcggagcaggcaggtactgctatgaacatcagcgttccccaggtgcagctgatcaacccagagaaccaaattgtggaggcaagtagcaacctgtgggagctgtcagctgaaaccactttctttgccatatccttgcttcccttccttctgatttctaactcgatgccggatgggacactgaatttggacagtgatgagggtgaagagccttcccctgaagcattggtgcgctatttgtcaatgaggaggcacacagtgggtgtggctgacccacgcacggaagttatggaagatctgcagaagctcctacctggctttcctggagtcaacccccaggctccattcctgcaggtggcccctaatgtgaacttcatgcacaacctgttgcctatgcaaaacttgcaaccaaccgggcaacttgagtacaaggagcagtctctcctacagccgcccacgctacagctgttgaatggaatgggcccccttggccggagggcatcagatggaggagccaacatccaactgcatgcccagcagctgctgaagcgcccacggggaccctctccgcttgtcaccatgacaccagcagtgccagcagttacccctgtggacgaggagagctcagacggggagccagaccaggaagctgtgcagagctctacctacaaggactccaacactctgcacctccctacggagcgtttctcccctgtgcgccggttctcagatggggctgcgagcatccaggccttcaaagctcacctggaaaaaatgggcaacaacagcagcatcaaacagctgcagcaggagtgtgagcagctgcagaagatgtacggggggcagattgatgaaagaaccctggagaagacccagcagcagcatatgttataccagcaggagcagcaccatcaaattctccagcaacaaattcaagactctatctgtcctcctcagccatctccacctcttcaggctgcatgtgaaaatcagccagccctccttacccatcagctccagaggttaaggattcagccttcaagcccaccccccaaccaccccaacaaccatctcttcaggcagcccagtaatagtcctccccccatgagcagtgccatgatccagcctcacggggctgcatcttcttcccagtttcaaggcttaccttcccgcagtgcaatctttcagcagcaacctgagaactgttcctctcctcccaacgtggcactaacctgcttgggtatgcagcagcctgctcagtcacagcaggtcaccatccaagtccaagagcctgttgacatgctcagcaacatgccaggcacagctgcaggctccagtgggcgcggcatctccatcagccccagtgctggtcagatgcagatgcagcaccgtaccaacctgatggccaccctcagctatgggcaccgtcccttgtccaagcagctgagtgctgacagtgcagaggctcacagcttgaacgtgaatcggttctcccctgctaactacgaccaggcgcatttacacccccatctgttttcggaccagtcccggggttcccccagcagctacagcccttcaacaggagtggggttctctccaacccaagccctgaaagtccctccacttgaccaattccccaccttccctcccagtgcacatcagcagccgccacactataccacgtcggcactacagcaggccctgctgtctcccacgccgccagactatacaagacaccagcaggtaccccacatccttcaaggactgctttctccccggcattcgctcaccggccactcggacatccggctgcccccaacagagtttgcacagctcattaaaaggcagcagcaacaacggcagcagcagcagcaacagcagcaacagcaagaataccaggaactgttcaggcacatgaaccaaggggatgcggggagtctggctcccagccttgggggacagagcatgacagagcgccaggctttatcttatcaaaatgctgactcttatcaccatcacaccagcccccagcatctgctacaaatcagggcacaagaatgtgtctcacaggcttcctcacccaccccgccccacgggtatgctcaccagccggcactgatgcattcagagagcatggaggaggactgctcgtgtgagggggccaaggatggcttccaagacagtaagagttcaagtacattgaccaaaggttgccatgacagccctctgctcttgagtaccggtggacctggggaccctgaatctttgctaggaactgtgagtcatgcccaagaattggggatacatccctatggtcatcagccaactgctgcattcagtaaaaataaggtgcccagcagagagcctgtcatagggaactgcatggatagaagttctccaggacaagcagtggagctgccggatcacaatgggctcgggtacccagcacgcccctccgtccatgagcaccacaggccccgggccctccagagacaccacacgatccagaacagcgacgatgcttatgtacagctggataacttgccaggaatgagtctcgtggctgggaaagcacttagctctgcccggatgtcggatgcagttctcagtcagtcttcgctcatgggcagccagcagtttcaggatggggaaaatgaggaatgtggggcaagcctgggaggtcatgagcacccagacctgagtgatggcagccagcatttaaactcctcttgctatccatctacgtgtattacagacattctgctcagctacaagcaccccgaagtctccttcagcatggagcaggcaggcgtgtaacaagaaacagagagttttgtgtacagcttgggaatgaaaaggttgattgtaaacccacagtatctagcagcgttgtgccaaattgcccttgtgtttctctccacccaaaatatcacagctgctttcctcacatttggttcatccgtgtgctgttcttttgggttctgagagggttttgccatgtttgcttgtatgaccaagtcaccaaggaaataaacaggaaggaaatccgagagcaagaggtcccgagtcccctcctagtctttcatcctgaatttgcacagaggaaagcgggtgcccggcatggccatcctgatgttgctggcgggatccccatgcaccttgtccttctccactgatactggcagctcggctcctggacccaagatcccttgagtggaattctgcagtgcaagagcccttcgtgggagctgtcccatgtttccatggtccccagtctcccctccacttggtggggtcaccaactactcaccagaagggggcttaccaagaaagccctaaaaagctgttgacttatctgcgcttgttccaactcttatgcccccaacctgccctaccaccaccacgcgctcagcctgatgtgtttacatggtactgtatgtatgggagagcagactgcaccctccagcaacaacagatgaaagccagtgagcctactaaccgtgccatcttgcaaactacactttaaaaaaaactcattgctttgtattgtagtaaccaatatgtgcagtatacgttgaatgtatatgaacatactttcctatttctgttctttgaaaatgtcagaaatatttttttctttctcattttatgttgaactaaaaaggattaaaaaaaaaat

SEQ ID NO: 860 - protein, 1182 aa, Homo sapiens
MKMLCHPHIIRLYQVMERMIYLVTEYASGGEIFDHLVAHGRMAEKEARRKFKQIVTAVYFCHCRNIVHRDLKAENLLLDANLNIKIADFGFSNLFTPGQLLKTWCGSPPYAAPELFEGKEYDGPKVDIWSLGVVLYVLVCGALPFDGSTLQNLRARVLSGKFRIPFFMSTECEHLIRHMLVLDPNKRLSMEQICKHKWMKLGDADPNFDRLIAECQQLKEERQVDPLNEDVLLAMEDMGLDKEQTLQAEQAGTAMNISVPQVQLINPENQIVEASSNLWELSAETTFFAISLLPFLLISNSMPDGTLNLDSDEGEEPSPEALVRYLSMRRHTVGVADPRTEVMEDLQKLLPGFPGVNPQAPFLQVAPNVNFMHNLLPMQNLQPTGQLEYKEQSLLQPPTLQLLNGMGPLGRRASDGGANIQLHAQQLLKRPRGPSPLVTMTPAVPAVTPVDEESSDGEPDQEAVQSSTYKDSNTLHLPTERFSPVRRFSDGAASIQAFKAHLEKMGNNSSIKQLQQECEQLQKMYGGQIDERTLEKTQQQHMLYQQEQHHQILQQQIQDSICPPQPSPPLQAACENQPALLTHQLQRLRIQPSSPPPNHPNNHLFRQPSNSPPPMSSAMIQPHGAASSSQFQGLPSRSAIFQQQPENCSSPPNVTCLGMQQPAQSQQVTIQVQEPVDMLSNMPGTAAGSSGRGISISPSAGQMQMQHRTNLMATLSYGHRPLSKQLSADSAEAHSLNVNRFSPANYDQAHLHPHLFSDQSRGSPSSYSPSTGVGFSPTQALKVPPLDQFPTFPPSAHQQPPHYTTSALQQALLSPTPPDYTRHQQVPHILQGLLSPRHSLTGHSDIRLPPTEFAQLIKRQQQQRQQQQQQQQQQEYQELFRHMNQGDAGSLAPSLGGQSMTERQALSYQNADSYHHHTSPQHLLQIRAQECVSQASSPTPPHGYAHQPALMHSESMEEDCSCEGAKDGFQDSKSSSTLTKGCHDSPLLLSTGGPGDPESLLGTVSHAQELGIHPYGHQPTAAFSKNKVPSREPVIGNCMDRSSPGQAVELPDHNGLGYPARPSVHEHHRPRALQRHHTIQNSDDAYVQLDNLPGMSLVAGKALSSARMSDAVLSQSSLMGSQQFQDGENEECGASLGGHEHPDLSDGSQHLNSSCYPSTCITDILLSYKHPEVSFSMEQAGV

SEQ ID NO: 861 - DNA, 33916 bp, Mus musculus
  misc_feature (1)...(33916): n = A,T,C or G
ctcctgtgggtggggtgatttacccctccctggaatagctctgttcagagccctgggctaacggaaagcgaaccgatgtgttctgtggaaatagctcctgtcccgactctttcgcaagtacacatggacttgagtaagcagctagttctctcctgaacctcagtggtcttcatgtacagggagatgcccagatcctctctccccagcatttgggaggctgaagcaggaagatctaggccagcctgtgtctatataatagccacataggccctgtctggaaacaaacaaacaaatatacactgggctgctcacagaccttgagtgttcttaataatgatgataacagtgctattaataaggcgatgtgtacagtgtgtatgtgtgcatgcatgcgtgcaagcatgcatgtgtgtgtgtgtgtgcatgtgataccgtgtgcatgtgtgtgtgtgtgtgtgtgtgtgtgtgtgtgtgtgtgtatgtgataccgtgtgatatggaggattaagcataggacctcacattgttaggcaatcaccctaccactcactggatgtccccagtcctatgttcctttgagagatcagatctctccaagttgtccagcctaactttaaactcaccctgtagaccaggctcctacctcagcctcccgagtaactagaagtataaggattcactatattcactatagtcagtactgaaacttttctgtcttgttttcttgagacagggtctcattttatggctgagaataacctggaactccaggccctcctatttgtacctcccaggtgttataaatgtgtgatgcaatgcttagactgctgttcttgagacttgaaaagtgtgtgtgtgtgtgtgtgtgtgtgtgtgtgtgttctcagggcacaattgtaggagttagttctctccttccaccaagctggttccagaggttggctcaggtcgttaaccttggtgtcaagttactagctgagcccatctcagtgaccttgtattgagactttttaacattcaaaacaaaaccatctgacttgatttgagaaaaagacaggcaatggcgctcgcctttaatcccagcactcgggaggcagaggcaggtggatctctgagttcgaggccagcctggtctacagagtgagttccaggacagccagggctatacagagaaaccctgtctcgaaaaaccaaaaaaaaaaaaaaaaaaaaaaaaaaaaagacaggcaatagttagtctttggtcaggaaaaaaaaaaatctccgagagccaggcaggctgagaggttcccggagagggcttgcttgtgagtccaggttgatcctagagccgaaatgtaataaatgaaaggtgaacaccctcttcccactgcaggatacagtttgcattgtggaaaggctcttctgcaagcagctaactgtgtgtctgtctgtccgttgggaaggtttaggaagtattgtgcaaatagtatatgtatgtctttgagagagagagagagagagagagagagagagagagaccaacccaataacaacaacaaaaacctagcaaatatctaacctttagacaataaggatactggtgtgctcacaccaccaaagagccactggtgccgctgtaacggcacatgcttcggtgccgctgtaacggcacatgcttcggtgccactgtaacggcacatgcttcagtcagctccactctgggtttctctgctcacgacagacagtttggtttggttttgctcagttggtgttttgctttgagagggtctcactttgtagtcctggctggcactgaactcacagagatccacttgcctctgccttcctaaaagtgctgggattcaaggtgtggttcactgtgctaggtacatgtttggatttccactatcagggcagaggtgagacagacttgctggaaaaatagagctgataaagaaaatgcctccctcctacaaaagagagccgatgcaagggccataaacgaggccctatgagtctgggaggtcagacttcaaatcccagttgtatttagacctctttttgactcagtttccctgtctgcatcataggcatgaaaatgatgcctgagggttgtagatgtagtttaattggaagagcatgcaggaagctctagattccatcttcagctctgcatagacctcgtgtgttcgtacacacccgtagtctcccaacccttgagaggtggaggcagggagatcaggagctcaagtgagctagaggccagcctgggctacatgagactctgtttcaaaaacctttaatcaaacaaacctaccaagatattattttaatatatgatcaaataagtagtatttatgagattttatactctgccttccttcctatgttgaaatccagcgtgcacacacacacacacacacacacacacacacacatgtaatcctgagttggacttgtcccgtttcatgcccttgacagtcataaatggccaccatgttgaagacttcggtcctaaacaacagaacggctcttcgcagtgggcctgggtgggctgctcagcagcacacagaccccaatcacaccatggtcaccaggaaggcctctgagatgagtctgcttggttgtatgaagtatgaagggtctaatggtaaactctatggttccaaggttgaggtttcacacaaaactatgctgcgaaactatgctgagcaaactcatattggtgtttccttccttggcattaaaaccagccctttaccttgacctgtcttggctatttatttatttacttttatagacatgtctcattgtgtagttctggctggcccggaactcagtatgtagcccagggtggcctcaaactcagagagatctgcctctctgcctctgcctctgcccctctgcccctctgcccctctgcccctctgcccctctgcccctctgcccctctgcccctctgcccctctgcccctctgcccctctgcccctctgcctctgcttcccccatgacaggatcaaagctgtgcaccactaggcctcgcatgagcttatttttgttttttgagacagggtctcattctaagcagggtggtcttgaactcataactctcctcccacctcacattccaagtgccgggattacagatgggacccatcccactcaactcttgttgaggattaaattttaaaatgaccactgtgggtcatgctgttaatgattctcattgtctattaagatgcaaacactggactagagtttcagttggagagaccttggttgagatctgctgtcatgacaatgcgtgctttgtgatgtatggagttgtatcccattgacccgtcacaaacgaactacccatcactccccaggccactttagagtctccctcacctccacatctgcttacaggctccctgtgagtcccagtcacccactgcaggagaacagagggtcacatagcttgtcttcggaaagaacaaattcagaattcagggtacagctcctacggactgcgttccacgcttatggcaccatagagttgaaaggtcaggagtgaagtcattgtcacaaggggatcagttcgagtcaaatgtaacgtgctgggtgtgacagctcatgcctgtaatctcagcacctggaagtctgaggcaggagaattgctgcaagttcaagtctggcctgtgttaaagaccttatttcaaaaaccaaggaaaagaaggtttgttggtttgtttgtttgttttttaagaaaatgaatggatttttaagtgttctcacttcaaaggtgtgcataacatagtgctatggcacacatacctgcatgtgctctaacacacacacacacacacacacacacacacttgcgtgcgtgtgatgcaaattatgggattctgccttcatcgactgacagcagagatcaaggtagtgacacagggattataatggataggaagaatatttggggctcctgtggaagctgaaaaggctagcattggacagggaagctgtcagaggaggttcctcagggtctgagccttcactgagccctgtgaactcacaaggcttaactaacagtgacctccttagccaaaggtagccactgagtgggaaaatcacgtgccagcattctggacacactcagtacacgttattccggctgagtgactctatatttgggaactgtaatacatgggcatacttagaaattccacagacctgttctgctcgcccatcctcacctgtccaaaaggagagtgagttcactctctctttagagagctgccctttgagccaacgcaaacgcatccctccttggtcttctctgaaggtaggatgtacccgagggaagcctggcttggttgaggtcggggcctccccctccatctccccatctgtctttttaagacctatttgcgtatctttcttgccatcccctatgagtttgttgaagtaggtctcattttcctatcttcaagttcttggcaaaaaaaaaagttgaagtggaaggcaccccactttcacccctgtgagtgaatgtgactatttccatggatgctccaaaatcagaggacacttcgcttgtgacacagcgggactgtgtggcccccaaatgttctttctcttcagctaccctgaccacagtgagtcccagctccaccgccctgaggtaaataatagcaacagtagttactatcattacttatgctaaggatctcaggttgactggacacatgatctgtcactgagctgtgtccgcagccctaagaacatttctttttataggtgtgttttaaggactggtctctggcctgatttttttagtctcattgaactccaagagaggctagccaatgcttgctctctattaaatttaatcaatcaatcaatcaatcaatcaattacttttttgagacaggatttctctgtgtagccctggctgtcctggaattcactctgtagaccaggctggccttgaactcagagatatgcctgcctctgtctccctagtgctaagatgaaagacttgtgtcactgtgctcagcttttaaaaatatttttagttaacttatttcctgtatctggcccacatgcatgtatgggcgccctgtgtgtacctggtgtctgcagaagccagaggtgggcatcagatctcctggaagtggagttacagatagttgtgagtcactatataggtgctgggaatcaaactcaggccctctggaagaggagccagtgttattaactgctgagtcatctctctagcctctaaaataactgttgttgttgttttttttaagttaattttggggggggtaaactatcaaaatgatttttggggaaggggatgggggatacggggtcaatttccagaatccacatgttggctgacaactctgtaactataggtccaagggatctgatgacgccttcttctggtcaccttgggcactaggcacacacagtgcacatacatacgtacaatatacatgtaggcacacattcatacacacaaaaaaaatctttgggaaaaaataaacagttttctagggtctcaggatagctcagtggttgaagcccttgcccagcaagatcaaggacaagagtttttgtgcactcctttaatcccactgaggcagacagatctctgctagttcgaagccagtctggcccactgtactgcaagttcaaaaatctaccctggctgccatctaagagatagggagatagggagatgatagggagactgtctcctagatttttggtgtacgagttgctgaggaatgaacccaagatccttgtgctaagcagacactctgtccttatcagggctaccattagccaggagccattaaacttctaagtagcagctcactgagtctgttccttttggggggcttgcgatgaagacaaaggaggtaagaagaaggaggaggcagcggcggcggcagaggaggaggaggaggaggaggaggaggagaaacttagagtctagcataaaataagaaccaaccaaagtgtagcaatttaattggtcaatgtggtcagcccctagagacagcaatgaaaaggccgttgaactgcttagtgttctgtggttacacattaaggagagagaacttccttcttcctccatgactggcaactctaatataatgccaggtacttcgaacttaattttgggttcttttgtgcatagaaggaaacaggagtgaggttggattatgaagtctaaacagggttgtgctgtgttatggcacacatggacggtacacacctataatcccagcaccagagaacctgaagcaggaggaccatgagttcagggtcaacttcagatatatgctgagttcaaggctagcctgagctaccagagagcctgcctcaaagaaaataaatgactgactgtggtggcccatgcctttactcccagtgctcaggagaccagggaaagaggacctctctgaatctggctagcctggtctatgtaatgagtcccaggctaatcactgagtggagaacttgaacttgggtagagcgcatatcccagaannnnnnnnnnnnnnnnnnnnnnnnnnnnnnnnnnnnnnnnnnnnnnnnnnnnnnnnnnnnnnnnnnnnnnnnnnnnnnnnnnnnnnnnnnnnnnnnnnnnnnnnnnnnnnnnnnnnnnnnnnnnnnnnnnnnnnnnnnnnnnnnnnnnnnnnnnnnnnnnnnnnnnnnnnnnnnnnnnnnnnnnnnnnnnnnnnnnnnnnnnnnnnnnnnnnnnnnnnnnnnnnnnnnnnnnnnnnnnnnnnnnnnnnnnnnnnnnnnnnnnnnnnnnnnnnnnnnnnnnnnnnnnnnnnnnnnnnnnnnnnnnnnnnnnnnnnnnnnnnnnnnnnnnnnnnnnnnnnnnnnnnnnnnnnnnnnnnnnnnnnnnnnnnnnnnnnnnnnnnnnnnnnnnnnnnnnnnnnnnnnnnnnnnnnnnnnnnnnnnnnnnnnnnnnnnnnnnnnnnnnnnnnnnnnnnnnnnnnnnnnnnnnnnnnnnnnnnnnnnnnnnnnnnnnnnnnnnnnnnnnnnnnnnnnnnnnnnnnnnnnnnnnnnnnnnnnnnnnnnnnnnnnnnnnnnnnnncttctcttctcttctcttctcttctcttttcctttcctttcttttgtctttcttttttcttttttctcttcttcttcttcttcttcttcttcttcttcttcttcttcttcttcttcttcttcttcttcttcttcttcttcttcttttgaacacagggtctctctctctttatatatagttctggctgtcctggagtttgctgtgtagatcagatcaggctgttcttgaactcatagagtgactcttgcttcttctgtctcctgagagctgggggtcaaaggtatgcaccgctcgacaagtggctagactcaaactcttgactctactgcctctgtttccaaatgctggagttataggcataagctattatgctaggctaaggccaatttcatatgtgtgtgtgtgtgtgtgtgtggtatgtatatatacataaatatgtatgtatatataatttatcttacgtgcattgtaattttgcctggatgcatgttttgtgagggggtcagagcctggagttacagacagctgtgagctgctatgtgggtgctgggaattgaacttgggtcctctggaagagtagccagtcctcttaacacctgagccatttctccatcctcccaaggccagtttttaaacacttcttttcagagtcagtttccctgaagcttcaaaagtctgatacttcccctaagagatttatttccaatatttttgatgactgtgaaattattcctgagagacagcaaggatccaacgagtgccctccccagctgcggactgtaaagccaatctgcctgagagcgtttggcagatacgcctactcaataattactagaagacttccctttcacacaccagtctgattttcttctcatcgctcatctgtctctggagtatggtttagagcacctgagttctagaacaggtctggccactcaccccagagtgtgagaagagaggactagagagagactcgggagcccagggtcatctttggcctacacaacaggttcaaagccagctggggatacgtgaaaccctgcctcaataaataaaaatatataaggaagtaaataaaaaaaaatccccatgactcagcagcagcaaaaaaaaaaaaaaaaagtccccgagtgagaaaaatctcccagtgatcactttcaggtactagttttggttgtttgggttttgtttctgtcactgtgataaactaccctacaaaaggcagcttagggaagaaagggctcagggtcacattttagctcacgcttccaggttacgagaacagtgcatcattgcaaggaagtcaaggcggcttgaacttgaagcagctgattgcacaatccaaagcagagaggaacaaatgattgctggttttctctcagcttgctgccatccggatccctaaaccagggagggcatcacgctgcctactatgggctggatcttcccacaccaaataaccaagacaatcccccttaggcctgtccatagccatcctgatccgggctatctccgtccctgagactcccttcccacgtgattgtaggttgtgtgaaggtgactaaattatccatctctacttctaattgccttgaaggtgtcgtgagaaacttcctgaagctgttaacatgatctttcgttttgttatcagggctttaattgaagcttatcatgaaaagggaccaaaggcagaggagagaaatcccaacagatactaaaactccacacggtgtgcgctgggtctctgtgcgcctcggttgctacagttgagggtttccaggctctgagggggcttctgaggagaagtttctaaggagggcttcattttctctatcagggctcctgagctatgagattctaaagtctgtccttatcaggaaaccttaaggaatcagcaggaagcccagaacaaggggaaggaaactcctcccacccatcaaaggatggccaaggggcaggcatctgagcagccgaggaacggacaccctgaagtggagaatggttgagccctcagagcaaaggcagagaaagctgtctcgctacagatacagcgtaaaaccacccttactgtgaggctagcacagagtggccattcccgcacccgcacccccaaagccccgcaatcttcgaggccagggaacggctagtcctttatgaacggcagcatctgtgtctctgttttcacattccacggccctctgagggggggacctgccctccttgttcctgatttttgccttactcaagaccagaaagaaaaattttttttcgaagtaaacaaacaaacaaacaaaaaaaaacaggaaaaaaagatgcaaacatgcatggtctcaatccctggggagcagctgattttatatatatatatattcctcacctgtttgtgagctagagggaaagccaggaattctagcagactctggacgttaacggagaccgctcatcctgggggctgagaacccagctcggctcggaatgttccctgcttgtgcctgactctgtgcgcgcccagcttctctttgatgtgcgctgtggatgagccgagctcagttctggaacagctgagtcctcctgtctgtttagattgttacctgaaggaagggagggggaagaaagtgctgattcgactttttgatggggaaaactttttttttaaacatgcaaatgacagatggcagagctttttggaaaaagaaaaaataataaccacacagcaaacgcctagggggagtccggtggagtttcatcatgggtatgaacagttgttgtttttttcaactttcttcttctttctgggtgttgatgtggatctctttctatttgttcaggaaactgtgacgtgtgttcttgggcagggtctgaggttttggaacctctttctaaaagggacagaaagagcaccctgctacatttgctaatccagaggctgagtggagccgagctggtcaggatgcaggttcccgtcggcagcaggcttgtcctggctctcgccttcgtcctggtttggggatcttcagtgcaaggtaagagacccaggatctttaattctctgctctgaaggcatcagcatatgcacaagtaattgtcttcatctgaaggtgcagggtgtcctattgtgggaggggaggtaaggaaggatttcaggtgcctcaacaacctcgtgtgagtttacttgagtttggtctaaaaaataataataattaattaaactctaaggtaagtggtggccttaaaacctgtcaggatgactgaaaagtgttcttatttttttgggtaaagatgtgtggtttattcatttaaagcattcaagaaataaatggaaaattacccaactgatctactgagatggtggcatcatggaattttctagaatagcatcctatcactgagttgtctgcatgaactccattttgatataaggtctcatgtagcgtaagatggtcttcaacttgctatacagctgaagaggacctggaacttctacttcccgagtgctgggataacaggtgtatgtctccatgctgggttccaaagaacggaatctgatggcgctgttattttaacaatgaaagaggcttttgtgtgtgtgtgattttctgagacagggtttctctgtgtagccctggctgtcctggaactcactctgtagaccaggctggcctcgaactccgaaatccacctgcctctgtttcccaagtgctgggattaaaggtgtgcgccaccactgcccggctttttttttttttttttttttaattggggtaaatgtagctatttttactttcttcttaagctcggctcttaccaaacattcaattttggctaggcaaaatgctaactctaaaacaatattttagaaacagcctgaggagtgttagcatttgtgctctcgtccagaaaacaggttttcgtttgaaaacctgtctgtaaatttgactgtcttttacagctgttcagtcatgctgactcaacctcaaactttttctaagaagatggaatgtttgtagaacaaacaaacaaacaacaactacaaagaagcacactttattcgccttaatatttagggaactatgtctaaatgaggcagaaggtcatggcctgataaataagttgccgagtttatggttgaaaaacataaaggaaatgttgagtcacagcgacatacgtgtcctggagtttcttcgaagtgactcctagctgtagcgttcttacttccggtcgaaatgacatctcacaggttacttcagaaattccttgcatagtggaagtttagaaacttattttcatggggctatgctaacgtcgtcatcggaaaacaggaagtgaccttgctaaggctcacttctatttatgtagctttgtgatattggcgcctacacccagggcctcatgcatgtccggggctctgctacacagctagagccacacttttccctttgactcagaattcaagttcatgcggatctttcagggaaaaacctttggcttcatgaaatagtccccggtagccacgtgctctggcaagatggacagctgtgaattccgcatttgtgacacctggctctgggtgtctctctaccagaggcgtgcatgtaagcctttcagttgcaaaagttcccagaaacatcaaactagactaaaaacaaaaccttgtctatttcatcacgagccagaaattaggaaggagtcgggctgggtggcttctaaggcactcaaggtgcagaggcaggagggactgtgagtttaaggccagcccagtcttcgagagttccaggatagcctgtgctactagtgagatcttatctcaaaaaaaaaaaaaaaaaaaaaaaaaaaaaaaaaaaaagcatgggggggggagaggtaggggaggaaaggctgtcttttatcttttatgtcatggttgacttagctcttagttgggaacagaagcaaagaaaggagacaatgaatgagccaaaaatctagggtgtttccaaggggttcttggcttaacgactttgctcatctctgaacatgaatgtgggtgtttggccacgagttagtgattaagcggctacagcaatgacactatgtgtcttaccacttgtgtcctgccacgagtgattagataccataccctctctgtcaaatcgcttaccccaggatagccttgagctcattttttaaaaattatttatgtatgagtgttctgtgtgcatatacatggtacatgacaagagagagcatcggatctcattacagatgtttgtgagtcacccagagattgctgggaattgagctctggaagagcaagtcggtgcccagccccttgaattcattatgagctgagggtggctttgaacttaagtatgtgtgctaccatgcccactttgtggagtgctgggaaccaatcctaggttttggttgcatgctacaccagtttaccaactcaaccacaagcccagctctcgccttatctttacaaagatgtttaaggactggtgtgtctgtagttttcctgtctaagtgatgagatgcaccgggattttagcctgtgatcttaggttactgcatttacgttctgagattgccgtaacaaaacaccatagaccaggtacttaaacaacagaaatatagccaggtagtggtagcacatgcctttaagcccagcactcaggatgcagaggctggaggatctctgagttcgaggctagcctgagctacagagttagttccagaaaaaccaagactacacacaaagaaaccttgtctcaaaaaaaccaaccaccaaacagtagtttattttccacacgcacattgtaccagagtttaaaacccaatccaagatgcctggcccccgtgtgttggcaatgttggcttcactctgacacctttctcatctatggtgcctgtgtcttttcacacagccccccttctctattccccattattctctccttagaaggacactgtcctgttggacataggccaccctaatggtcccattttgacctcttcagtgaccatgtttccaatgttgtcacattggaggcacttgtaggttagttcacgtgggaaaaaaaatctttcttatgtataaataattcccgtaacatactttatttctacaaatccagctaaaaccacgatgtaaaatggtatccagtacaaggaaacatgtgcaatctgcgagtgggtgataacagtgatggctaatctacttaatagaggctcccgggggactgtcacctaggcgaggcccttggctcctactttgcattaccttttttacttatccttcttaatgctcataaaacacttgggaggtggggctcccaaggtgagaggatcagaagtgaaaggccatccccagacaaatagtgagccttggactatctgagaccctgtctcaaacaaagcaacatgttcacaaagagacaagatgaaaaaatgcatgagcaggtgtagtcaaggagccgaggctaggcgccccccccccccccccgacaggaacaataccaggtccactcatgagcacagctgttggtaaagtgattttgtaatcactgcccaataacgaccctctctctggccctgaggaggaatttatgacgagaactgaccggaactgacaaccactgtctcacaggctccttacatcagccccttgctaaatatgggtgtggtttgctctaggcctgtgggagtgagctaataagtcattcagtttggaggtcagaaataagtttctagactgctcaagggtcattcaggttctattattattatattattattttattttatttatgtgcaaagggattttgcctgtatatatgtctgtgtacaaggtgccgagggaggccaaaagagtgtgtcagagccctaagaactggagttacagatggttgtgagctgccaagtaagtgctgggaattgaacccaggtcttctgcaagagtagccagtgctcttaaccacagagcccctgtctccagcccctttttaatttaaaacaaacagacagacaaatnnnnnnnnnnnnnnnnnnnntctgcagcctttgctatgtttcctgtagaggtgagaataaaccgaaagtaaatttggagttttttatagcctgtcagaccatgccccaggggggaagcttgcccatcctgtggcattgataggccaaaaggaagtagctccaatatagataacagccgttgcctgaacgttactgttttgtttttttaaaaaatactttttttatttcatgtatatgagtacactatcactgtcttcagacacaccagaagagagcatcggatctccttatagatggttgtgagccaccatgtggttgctgggaattcaactcaggacctctggaagagcaatcaatgctcttatccagagagccatctccgcccccccccacctccccctttttttagaaaagtaaatcagattagtctcttggggggggcatttttttaaacttcccctttgacagtttctacttaagtttttctgcatccatagcaagattcccagggaggccagaagattaggatattagtaaatttccacctggtaggaggtgtggaaagccaaatattgagatagaaggcctgtttgggagagttgctctgcttgtcttcttgtgaggcagagctagtgagtgtgtgagtgtgtgcagagggtatggggtggccggagtgcggtggaggtgggagcgcacatacctttagtttctgcatttggtgggcagaggaaagtagatacttatgatttttgaagccagcctggcctacatagtgagttccatacagagaggcagagagagagagagagagagagagagagagagagagagaggagagatgaagttggtggggaagaagctgaggagaaacatgatcaaaatacattgtaagaaaacgataaaaaagagttaagaacaatattttttaaaatggctggcaaggcagcccagtgagtaaagaccatggccaccatgtctgatgacctgattttgatccctgggacatggacacacacatatcagtataataaaaacagaacaaaacaaaccaaacaaacaatagcggtaattattagaggtttatagcacttcaagcaagagaaagtccagatagtctcagagcttcaagggtcagaatttcagtcttttcacagccttcccacgcccaagcacagctatgtcaggaattcgctatctgtaactgtgttctttattttaatgtgccattaatttaattagtgtaaaaactgggtgggtttcagaatgggacaacttttcctttcgattgctttctttcttgttttattatttgttatcttatgaccttgggtgtgtgcatatgtgggtgagcatgcacacccacagggaggccacatgaccgctttcgggacatcctcagggacactgtccatctcctttgagacaggtctgtcatttgcctggaactcacaggttaggttagactggctggccagagagcccaggcacttccctgtttccaccctccccgttgctggggttaaaagtggatacaaccagccctcccgtttgtagggtcttggataaaagtcaagtgcttgtgcatggacagcaagccctttagtaactgagtcctgtccttttacgtatttgtttgtttcttgagacggagccacagcgtgtatccctggctaactttgaaccttctatgtagactggcctggccttgaatatgtggccactccactccaccttgccgatcttctcaagtgctgggatcacagacatttgcaagcagcagctttgatttctttctttctttctttcttccttcctttctttctttctttctttctttctttctttctttctttctcaagatttatttatttattttatacatatgagtacactgtagctgtcttcagacactccagaagaaggcatcggatcccattatggatggttgtgagccactatgagattgctgggaattgaactcaggacctctggaagacagtcagtgatcttgaccgctgagccatctctccagctacctgctgatttcttattgttagacagggtctcacgatgctcatgatgaccttgaacttggtgtatagatgagaatggccttgaccttttgatcctcttgcctttgtttccggtgtatgacaccatatctgctttgtgcagagctgggggcagggggaagcctaggatttagtgcatatcagaactttaccaactgagctgcctcccctgcctttcactagctgtgaagccattctactaagagtcagtttctaagctatacagctcactctccaactcacagggctgggttttcctatggtcacagattgtgtaaccatcagcgttggctttggagaaaaactttcccacctcccaaatatgttgagttttggagggggtgggggggagtcctttctatttcagaaatatatttgcttaatctgccagagttacagttttcgtttcgttttcactagtgggaagatgcggtcgttgactggggtgcccccttgtatcgtgggcccgggatgcccctcagtggtagtgcccttgcagaggatgcctgatgctctgggtttgatcttgaccctgaaggggaaataacaacattcagttagctctttggagaactttccatccaagcacacatttttctcagggcatcagccacttgcagagggcagtgccctatcctgtccagtagccagcagccacatgtgactactgggcacttaaaatattgattgagtcaggtggtggctcatgtcttgaatccccaacacttgagaggcagaggtaggcagatttctgtcagggctccacagagaaaccctgtcttgagaaaccaaacaaaaaacaaaatcaaaaacaaaaactaagaaatacgatgagtcgagactgacatgtgagttcaaaataagcacactttggaagagttgggttaaaacagtataaaatatctcacttgtaactttaatgttaattgtgtattaaatgatgatgttttaatatgttcaagtacaatgcacttattctttttacttttttttaacttaaaaaaatacggctgctaaagaaaaaaaaaaaaaaaaaaaaaaaaaaaaggaggaaggaaacacaatgctgcagaaacaggcaaccgtagatcgagaagactatgattttattggacgaagtttctctcgacagctgatgtgggaacataccgccctctgctggacaacaggctgctctacacccctctaattctcaccacaatagactcaaaagtcaaagctagatgtcttagaatatcaagtggggacagtgcggggaggggggcggctttaaaatgcattgaacatgggctgtgtgcaaagtcttgtgttgacgggctttcatcccccttgaatcaagaactcgttgccatagcgttattgaccataaccagagaaccagagcggtcctaagaggtgacccagtctctctccaagaggtttactctcagaaaaagggcagcgttgtcctccttaacagggagaccagcatttggaaagctgtggccaccattccgagaacctagctttttcttttttaacatgattttatcctttttaaaatttaattaattaattaattaatttttgattttttgagacaggtttctctgtaaagccccggctgtcctggaactcactttgtagaccaggctggcctcaaactcagaaatccacctgcctctgcctcccaagtgcttgggattaaaggtgcgccaccacacccagctaattttattttatttttttaatttttattttttaatgggtatggtactttagtctgtgcatgcctggtgcctgcagagaccacaggagggaatcagatccccagtggtatcctaagtttgtcacaaaaattaaatatgaaaaagaaaagaaaaaattttaaataagataaagatatataaagagcctcctcccttgtactggggaaagggggggaagctcttttccccattcaaggttaacctgggctacatagcaaaaccccatctcataacagcaacaaggagagtgtgggggatgagttgtctctattaaaaaaaagaagaaaaggcaggctttggggctcaggtatttcaatcctgactcctccatgagcctgtgtgtaatgtggagataaagatacaaatgtgacaatggttctgggcatggaagggcacacttgtgataccaacactgacaataatgaggcaggaggatcaggaactccacgactgtggtggcacaggcctttaagcccagcacttgggaggcagatctctgagttccaagtcagcctgatatacagagtaagtaacagtaacagggacagccggggctacatagtgagaccctgtctcaaaaaagaaaaagaaaaaaaaaattaagatctaagagggcctagaatatggcccaagtctgtgtacaaaaagttaataaattaaagagttactacaatgccttgacattattttaaggttttatatgaatcttcttatttaaattttttctttttttttgtatttaatttttgtgacaaacttaggataccactggcctttaaagtgcaagttcagaggtcaaggttccagaaccttcgggggcgggggggggggggggaggccagagctgagcctcctctctcagccgctcactcccaaagttattctattttaaccctttcctttttatttttattttttgtttgttttatttctggtgtgtgtgtgtgtgtgtgtgtgtgggtgcctgtatttagtgtggtgtgcgtatgtgtgagtgtgcccaaatgcacgagcatgggtgtgtacgtgtgcctaagtcggaggacaatttgtgggacaacttgttagttctcccctcccctcatgtggatcctgggatttgaactcggatcttcgggctcagcagcaaacacctctacccgctgaaccacctcactggccctattgtacagagccaggtgctattgtgaagaagaaccatgagaatgacagtgtctgtcacaggcattgttggacataaaacctgtgaccctgggctggcgagatggttcagtgggtaagagcactcactgctcttccgaagatcctgagttcaaatcccagcaaccacaaggtggctcacaaccatctgtaatgaaatctgacgacttcttctggtgcgtctaagacagctacaatgtacttgcttaaaataataaataatatttgggcctgggcgagcagggccgaccagagcgagctgggttgaccgggaagagcagaggtcctaaatcaatacccaacaaccacatgatggctcacaaccatctgtacagctacagtgtacccatatacataaaataaattaatcaaaaaaaaacctgccgtggtggcgcacacctttaatcccagcactcaggacgtagaggcaggcggatttctgagttcaaagccatcttggtctacaaagtgagttccaggacagccagggctacacagagaaaccctgtctcgaaaaaccacaaaaaaacccaaaaaccaaaaaaaccaaccaaacaacaacaacaaaacccctgcgacctgccaaatgtacaatccatgtaattaccttgttagagacagtgtaaccaattctaaggaagccgactgaaagatgtttatcacccacgtgggttccttgttcgcacaggttatcctgctcggagagccaggtaccagtgggtccgctgcaaaccgaatggcttttttgcgaactgcatcgaggagaagggaccacagtttgacctaatagatgaatccaataacatcggccctcccatgaataatcctgttttgtaagtagactttcattcgatctcacaggagcgcctgagtgtttcatttcaggttcttgctgtggtaaaaactactccacagagagcaaaagtgggccatgtgtgctgaagcaagagatgtgccaatgaacatggactcatccatgtttttataagggtttcttgtgggcagcagcgataagccttggaaagtatttgccccaacatatgttggaaaggattgaatataattttctttaggcaaataaagtgtttatatattaaaattgagttgagttagatttttttattttttattttattatttatttatttgtttttgagaaaggatttttactatggttttttactatactaggctatgctagcctagaacttgctatgtagaccaggctagacttgaactcacagagatcagcttacctctgggattaaaggtgtgtgctaccacagcaccacagctgtttcttgtggggtttttttggagggtttttttttttttttgtgcttcattggaacacatttattaaatactgaaatggaccctttgactttgcttcatctgttctatttgtcattactgtttactggttttactttgtgaacaacttgccactcaatgtgttctggaaaagcagtgtgtcttacttagggtttcactgctgagaacagacaccatgaccaaggcaactcttttattttaattttttaaaaagatttatttattattatatctaagtatactgtagatacactgtagctgtcttcagagacaccaaaagagggcatcagatctcattacaatggttgtgagccatcatgtggttgctgggatttgaactcacgaccttcggaagagcagtcagtgctcttaactgctgagccatctctccagccccaaccaaggcaactcttatagggacaacatttaattgggtctggcttacaggttcggaggttcagtccattatcatcaaggtgggagcatggcagcatccaggcaggcatggtgcaggaggagctgagagttctacatctacatctgaaggctgctagcagtctgacatctttaggcagctagctctctaagcccatccccacagtgacacccttgttcaacaaggccacacctcttgatagtgccactccttgggccaagcatatacaaccaccacacaatgatatacaaacagatactgttaggacccaaagtcagctaggcatggtgacacactcctctaaatggagaaaccaaggcggttgggagttcaagtccaggctcggctacatagcttgcctcaagtcaccttgtactatccaaaagaagcaaactttggtttctcacttgggcaagcatattcacgcgcatgaacacatctcagggtatgtgtggaggttggaggaccgctcacgggaataagttgttgcctgggggcttgaacttaagtcaaggcttggcagcaggcacgtttgtgatgagccgtcttgttggctagtgagggaagatgcctgttggtcctctttgctatctcttgttgatttcacttctctactatgccatgtttaagaagtttccttgtgttaaattgttcagttttcccgtaccctgtacccacccccttgtctcagacttcctttctccaggtccctctctgggtctggcatctcccatcagtatgcagatatattctacagcttcttgacatggaagagactccctccctcgactctgaacacctatagctatttctccactctgctctttattgaatcagattgattttttgtttgtttgtttgagaacagagtctcatctcactatatagccctcctggttgtcctggccttgaactcagagatctacctgcctcggcctcttaaatgctgggagtaaaggcatgtgccaccatacttggcactttagcacctcatagaagggatgcttatggttgttttagccccacttccaacccccaaccccaagcctcagcctccaaccccccaccccccgctcatcaacacacacagttggatttctgctccagccttcaatcctgagtgtgtctgcctggtgatcgacacatctattgattgaatctctatttttaggcttcttgacccctttcctgcctttcaaaatgactgacccaccgcttcctttgaaacagttccttctgtggcttcctgccatccatccaccttacccaggttgtttccatagctgctttcccttttgatccgtgtagatgctgagtcccaaacccagctcccctgtgagagtagcaatggctctgaaccccagagttgtctcttcagtcctgcctctttgttttgaagtgctgaagcagattttagctcttcgaatttgaacaactgggtgcctgaatttatttccatgttgccccccactcnnnnnnnnnnnnnnnnnnnnnnnnnnnnnnnnnnnnnnnnnnnnnnnnnnnnnnnnnnnnnnnnnnnnnnnnnnnnnnnnnnnnnnnnnnnnnnnnnnnnnnnnnnnnnnnnnnnnnnnnnnnnnnnnnnnnnnnnnnnnnnnnnnnnnnnnnnnnnnnnnnnnnnnnnnnnnnnnnnnnnnnnnnnnnnnnnnnnnnnnnnnnnnnnnnnnnnnnnnnnnnnnnnnnnnnnnnnnnnnnnnnnnnnnnnnnnnnnnnnnnnnnnnnnnnnnnnnnnnnnnnnnnnnnnnnnnnnnnnnnnnnnnnnnnnnnnnnnnnnnnnnnnnnnnnnnnnnnnnnnnnnnnnnnnnnnnnnnnnnnnnnnnnnnnnnnnnnnnnnnnnnnnnnnnnnnnnnnnnnnnnnnnnnnnnnnnnnnnnnnnnnnnnnnnnnnnnnnnnnnnnnnnnnnnnnnnnnnnnnnnnnnnnnnnnnnnnnnnnnnnnnnnnnnnnnnnnnnnnnnnnnnnnnnnnnnnnnnnnnnnnnnnnnnnnnnnnnnnnnnnnnnnnnnnnnnnnnnnnnnnnnnnnnnnnnnnnnnnnnnnnnnnnnnnnnnnnnnnnnnnnnnnnnnnnnnnnnnnnnnnnnnnnnnnnccccccaccccaccccacctccgccactttttgttttcttttttgagaaagggctcagtagcccgtgctggctgcagttcactatggatccaagtatgactctaagttcttaccctaccaccactactacccaaaagctgcaatactttgtgtgtactccacacctagtgtatttctttatattaaaatattgaaattacattataagtagaactttataatttttttctttgtattttaggatggaaggaccctcaaaagatttcatctccaattatgatgactatgggtcaggttcgggctccggctctggctccggctctggctcgggttccggctccggaagtggcttcctaggtgacatggaatgggaataccagccaacagatgaaagcaatattgtctatttcaactataagccttttgacaggattctcactgagcaaaaccaagaccaaccagaagacgattttattatatgaatgtgacggtctctgtctccccacctccatgtggaacaatgtattcagtatacttagtgtaccacgtttaaatgaccagtctcaggataaagagttttacagaaaatttaaaatgcctggaaaagactcttgaatcctgttacccctttcctcattaactcgtaaggaattatgctttaatgctgttacctatcttgttgttctggaaaatgcctgcatttatgtgtattgaatcaacatttaagaaattaacacacacccccattattatacaataactttcaaagccatactggttttgaaaattttaatttgatagcaagttgatgaacaatctttcatacctaaagtgttcaggaacccaactcgcattgtgaattacaaatatattcctttatgtgattaaaaagaaaataaagtgaaacacagtggcctcctaccgtggctatgtgacatggtttacatggtgaggggtagatattgagctgtggccattggatgtgacagggaagaccaaatgttatcgaaaaatgttgtgggttttttgtttgtttgtttgtttgttttttgttgttgtttttgagacagggtttccaggacaggttgtcctgtaactcactctgtagaccaggatggctagattcagaaatcctcatgcttctgcctcccaagtgctgggattaaaggcatgcgccaccccccaccccacccccggggttgttgtgggttttaaagttagaaacttaacgcctcaaataacatggagttgtggtctcaacggctcataatgctttacctttgtctagatgcctgttcagggtcaaatgttactccattaaagtgaacatataaccaaaggggggagatgtcatctggaacttcctgttctaatccagggaatagttactttgaaaaaataatcaatcatattatacatattaatatataataattttataatacagtatataatattggtgtaggtgatatttaatataaataatataataaaaagtgtatgtaattgataacatacaatatgatataaaatgtgtatataaatacatgatattgtaggctggagagatggctcagtggttaggaacactggctgtttttgtaggctggagagattgctcagtggttaggaacactggctgtttttgtaggctggagagattgctcagtggttaggaacactggctgtttttgtaggctggagagatggctcagtggttaggaacactggctgtttttgtaagctggagagattgctcagtggttaggaacactggctgttttgtagagaatccaggtttactttttggaactcacatggcagcttgcagcaggagatctgctgtccctttctagctatgggacatagcagacatgcatatgatgcacacatagaggcaaagacacacatacatagaggcaaagacatttgtacacataaaataatacatttaaaaatctttgtaaaaagcacatggaaaatacctcccaaactaaagcaagagccatctctgattctgtgccccccttcttttttttacaaaaacacgaaagtttattataatcatacctttcagaaataattgttgtttacagtttctgagttctttcagtgccttatttttcccctcttcccttctccctcttgctccagcccttgctcactctccggcccagctcactcctcgctccatcccacaggtttttctatcggatctattacgggtggttgtgagccaccatgtggttgctgggatttgaacttcccggaagagcagtcgggtgctcttacccactgagccatctcaccagccctatttttttttttaaaagaaagctgacctgtgagaaagctggcagtcagaaagccttcatttatactttctacttcagactcctgccaggagttcctgctctgacttctctcagtgatggactgtgtcttagttagggttttactgctgtgaacagacaccatgaccaaggcaagtcttataaaaaaacaacatttaattggggctggcttacaggttcagaggttcagtccattatcatcaaggtgggagcatagcagcatccaggcaggcatggtgcaggaggagctgagagttctatgtcttcatccaaaggctgctagtggaagactgacttccaggcaactagggtgaggatcttatacccacacccacagtgatacacccattccaaccaggccacacctattccaacaaggccacaacttcagatggtgccactccctgatccaagaatgtacaaaccatcacagactgtggcccagaatggtgactacttccttccctcttcgaagttgcttcagccagaatattttattacagcaacagaaaggaaggtagaaccaatgttacggctcaatggggagctatttccactagggtccattgtgagagttccactgaactttaggcgtggcattttaagccatttatgccaagggatgagagcccaaaataggactcaccttgaagtaatgacgttaatcacgagacggggctgctgcacagctgagagaaaggacatgtgacacttgggaggcctatggaggttcctcttaatagttttactatgtttagccaaggatcaaaacaggaatactatttatgaccattcactatttagcggtgcaaacacaaataactataatacatttttattatgtgtttttccccaaagctgtgagttgccattctctcagtgcattgtcttagtatttcagtcactgtttatcaatataggggttggagaaatggctcagtggttaagggcactgactgctcttccagagatcctgagttcagatcccatcaaccacatggtggctcacaaccatctgtaacttcaagatctgatgctctcacacagacatacatgcaggcaaaacaccaatgcacataaaataaaggtagataaatttaaaaggtatccacatagctctatcttttgctaatctgccttctcccctcgttagcgttgctgtgtagaactgatggttccttagggcccaatggctcatcagtgacagtgctgcctataactctgttacctattgcatgagtcataaatggtttacagaagctgcagtgtaccgagtaccacagggagaacctaaggtcctttgaaactggagttacagacagttctgagacaccacgtggatagtggaaccaaagttgggtcctttgtgagagaagcaagtgctcttaactgttgagccatccctttagcctctgatatgaaattttttatgggggaaattgcctcagtgattgatgtaaaatgcatccttttgttttttgttttttgtttttttttttttttgctatttggatatttgtgattactcggtgttttgttttcacaaggacagaatactaattaagaataagagctcttgagaattgaaaatgttagcatacattctttacttattgggttttttttgggggggggaggaggaggtgttggtttcaagacagggtttctctgtgttacaagccctggctatcctggacttgctttgtacaccaggctgacctcaaactcagagatccacctgccttagcttcttgagcactgtgattaaaggcatgtgccaccatgtccagccttattatttattgctacataattaatcaccttaaaactctatggcttatctgtatctttaatcccaagatttgtcaggtgaatctgtgaattcaagattaacacattgcaggacagccaaggctagatagtgagataaccccctccaaaaacaaaacaaaacaaaacccagaaccaaacaaaaaaaagccaaacaaacccaaaaccttggtggcttaaagcaatagatttttagaatttttatagtttatgcaggtcagaaattaagtagactatctggaaattctatttagaaagtctttttgtttgtttgtttgttttgttttgtttttttgagacatcgtttttctgtgtagccctggctgtcctgtcctggaactcactctgtagaccaggctggccttgaactcagaaatctgcctgcctctgcctcccgagtgctgaaattaaaggcatggctcacaactgtttgtaactccaattccaggagatctggcatccttacccagacacacgttatggcaaaacactaacacacataaaaataaaattttaaaagtacagttaggatattcaccagagctagagtcatctgaagacttggtcaaggatgaaaaagaaagtttccacattggtattcgaaaatagttggaaagttggtactcccatctgttttcagaagagaggggagatgtcctctccatggggctttacaccatgggagtggatgttgttagaagggaatggtccaggagaaaccaagtcaggagcagcttgaggcagccacaccacgctattctgttggtcacacaaaccgactttgatagaattcaaggatagattacacaggagtttgaacactaaaagagaaagctcgaggctggtgagatggctcagtggttaagagcactgactgctcttctgaaggtcatgagttcaaatctcagcaatcacatggaggctcacaaccatccataacgagatctgatgccctcttatggagtgtttgaagacagctacttatgtataataataagtaaatctttaaaaaaagagagagagaaagctcacggagagctatgccaaacaatacacacacacacacacacacacacacacacacacacacacacacaaactcatcatcatcatcatgagaactggaacatgagcaaacatggtggctcatgatataatttttgcattcagggactgaggcaggagaatcaagagtctaacgtcagcctgagatatgtactaagaccatttctgggacaaaaagaaaaacaaggacaggtgagatggctcatcagataaatgtgtttgctgacaggcctgaggacctgggctcaattcccagaagtgacatgtacaaattctgctctccatgcacaccatgtaatatacacctcccagaataaagaaacatgaaaaggaaaaaggaaaacaacaagagacagatggaagacaggaaagaaagtgaaaatccatttaggatgctcaatctaggatttcaagaaattccaggaagacagccgaggatgtggcttagtggtaggctggttgattgggatccatgaggctctggttcagtcctcagctccacaaaggaaaaaagaaacccaggttaaaaaaggtgtgtgtgtgtgtgtgtgtgtgtatgtgtgagcctagagcaaatcatcaaagaaatttaggaagactgcagggtacacagtcaatacaggaaagttacacacatcacaacgaagaactgaaaaatgaaaaacttagttttatttacaatagtgttaaaaaatacaggcacttagagataaatttaataaaaatgtataacactggaaattagaaacactggtgaagaacactaaaaaaaggtaaaaattagaaaaatgcacagtgctcatgaatggaagacccagtattgtttttattttacctccttgagtctttctttgggtgcatggaggttttgcagaccttctgtacaaaacctgcatatgtgatgctcatggagaccagaagagggcatcagatccccctggtaaggagccactatttggatgctgggaatcaaatctcatgcttctgaaggggtagccagcaagtgctcttgacttagctcagccatctctctagccccaatcgatagatttttgacaagcataccacaccacagcagtttacaggggaaagtattttgagcaaatggtgctagaaccaacaaacacagttaacctttcagatcttagactatgcgcaattgtttctctcttttgtttccttgtaacaaggtctcacactgtagcccaggtcattcaggggactaactgtgtaatctccaggggtcttttaattcatggcgattcttctacttcttctgtctccggagagctgggattacagctatgaacctctatacctgacttatccttctttatagagtgggtgatgctccttcatccaagccatctgcatcacagggttttaatcaatagtattttgagatctaaactcccttctctgtccccatactattttacccgtctgtaaatatgacaggtaatctccaatattgggaaggctgaaggaggacagatgtgtttcttgacagcctgggctacatagcatattccagaggagcctgggacacctagtgagaccctgtctcaacaataaatatacacacaaacatccattcgttccaaagctccctggcatagcaatctttaagatttgttttcagataatatcattttaggcagatttctcctgcatgcatgaaggaagtgcagtgttccatctgcagcaatgcataaaaccaccagtgactcctgcaattacagcattgggaaggcactttggaggtgctcactctccacttgaggctagcctagtctacatgagtacatgagaacccctgtcttacaaacaaaagactcatttccagtatttgaattctgtcgcgattggagaccgaagcctcattttaacctttaaatattttagacttacaacttgacactctactccccaagttgagtttcgttatgatagggctgatgacacccctccgcccataaatctgaatgaaaggttcagttcctaagccttcgtagtatttcatctatcctcaggttttctgggcctccactacaatgactgactggatcagagtgttggagagctgcgttttgcacgcttgcgaaacttttaggaagggctgttgccggggagggggggtaaggagggcggaaccgatttgagagtactgcctctccggcttggaaggctgcgtcacgagctatccgtggactgcaaaggatgtgctttaaagattagcttttctccctaaccgtctcttcggaggccaacaattctcggggctgaggcgggaaacagatcaggcgcaaaggtcggaactgcagcaagcccgcaaagacacgcctcccgcacaaaccctcgagtcccccaagtttccctagggaaaaggaaatgggcgtgccggagggaggagtttgacagcgcacggctcgtcacgtgacaactagctctagggttgctggactgagaagacagatctttgactcctcccaccagacgtcacccacccagaccacgccctcaaccgaaaggcggggcggaggagccccgcctcgaaacggccttccnnnnnnnnnnnnnnnnnnnnnnnnnnnnnnnnnnnnnnnnnnnnnnnnnnnnnnnnnnnnnnnnnnnnnnnnnnctctagcagggcggggcctctagcggggcggggtgggggggggagggagaagaggaaaaggagtggtcacgtgcggctgatggcctacggtcacgtgacgggcggcggggcgcaggcacccaggctgggagttcttctgagggaaagccgagtggagtgggcgacccggcggcggtgacaatggtgagtgcgcggcggcctgcctgcgaggtcgtctcccgcggggccgtggggcgcgcggcgggactcccaacggcgggcgcggcgccgagcctgcagggaaggggcgcggagcggtgaggcctgacggctgcccgctcccggccaggcctgagcacctgcggccggcggcactgtcccggccatgtcggagcctctgcccgccttcctcgaccggctgtggggaccctggctgggcacccgcagcccgcccagccggagctcggcagcctcgccttccaaggtagccgaggacagtcagtgccctctctcccagttccggactctggcgagacctgctcaccttcctcgtcccgagctcgatagagtccgcttattttctttaagctggttgtggagacattctgcgatttcttgattcgggtggaggcttttggcacttgtagaataggaggggaagggaggggagacaagagggtgtcggagccgagacccctcatttatatctccagacgccgatttaagcacttggtttcacttccttccctaagcgatttctataacttagcactttgggatgttgcagtgtcttgggagcccaggcagggatgaaaatcagagcacttaaccacacttaatggaaagcaccgttgggcgcgctagtgtttaactacgcgcccgcggtctatagattagagctcctttggctcgtgttatttagcatatactccatgagagcccactgtgcgctccccttatactacccgctcttcccaagctcgccacttttaataaactgcttgaaacttctcgtctcaagccagccagccaggtctatttttaaaacgttgctttgattaaataactttgagtcagaaattatttgctttctctagggtttggggggtgggggagaagttcattcagggagcgttttcttaaacagtattttgggtgagtccagggacagataaacaaggcaaactgcttgcttccttgcagcttacagactctggagagttaagcatttgtttagataaattagtttaaggtggaaattacaactgctgtaaataactaagaaggaattagtaggctgttagggagtcctcctttcactgtttataatttgaaaagaaagcttaaattgctctcttcttggttacttagttgaattagtccttctagttaagtttttttttttttttttttttttttggtttttcgagacagggtttctctgtatagccctggctgtcctggagctcactttgtagaccaggctggcctcgaactcagaaatacgcctgcctctgcctcccgagtgctgggattaaaggcgtgcgccaccacgcccggcccttctagttaagtttaagagcaatttttttttttatttttaaggtatttgtcaaacgaaattgtaaagctttaaagcctttgtatgggcacacatgtatgtatgagaatttgctgtttcattgtgtgtgggctcaagtgaatacattgtggaagctttggttcctctgagctctgttcagtttttttcttactgaaatttttttcctatatattttgattatgtttttcctttccttcaagttctgtttctttacatcaagcagacttaataaatttccttaaatggtgcccacagagtttgttacatttttatgtatccacgtgtagttttgctagatggtaatgctaaacaatgtatgtcttggcaccttgtgcttgttggagggcctcaagaaagcctcagcactcctggtactgtagttaaagtcagttgtgagctgctatttggatgctgggaatctgaacctgggtcctctggaagagcagccagtgctcctaaccattgagccagccctgttattgaaaaatattgcagaactgtgttttcttgtgtgttttggcagctttagtggcaatttaattttgttaaaatagtatttgtgactttaaatgttaaatttcaaattggaaaagacctttcggtgtgttacatagagaatatatgtagaaaaaagttgccatatatcattttacatgtaaaacatctttcatagctgggcgtggtggcacacgcctttgatcccagcacttgggagacagaggccagcggatttctgagttcgaggccagcctggtctacagagtgagttccaggacagccagggctatacagagaaacacagtctcaaaaaaaaacccacaaaaacaaaaaaaataccattgcagaaagaaaattgctgttggtgactttggagcatgttaaatgtactagtttctagttagttgtttgaatttgtcccttttgtgggggctggagagatggctcagcagtaagagcactggctgctctccttgagagaacctggattcagttcccagcactcacacaatggctcacagaatctgagctcacaggatctgttgcaaaaatctgatatcctcttttgacccctacagggacctgctacacacatagcaaacaaatatacactcaggtaaaacattaatacaataaaagatacacataaataaaaaaaggatttatgcaggctgatgagatgggggttcagcggttaagaatattgactgttcttcccaaggtcctgaattcaattctcggcacccatgtgatcacaaccatctataaagggacctgatgccctcttctggcatgcagacagagaacacatacattaaaaagaaatgcataaattttaaaaagatttacacacacacacaaaagaaactatctcctttgttaatataggaatactgaaaacaatttggtcattgtgtcacctgtgacctacataaccttaggaagctcct

SEQ ID NO: 862 - DNA, 938 bp, Mus musculus
atttgctaatccagaggctgagtggagccgagctggtcaggatgcaggttcccgtcggcagcaggcttgtcctggctctcgccttcgtcctggtttggggatcttcagtgcaaggttatcctgctcggagagccaggtaccagtgggtccgctgcaaaccgaatggcttttttgcgaactgcatcgaggagaagggaccacagtttgacctaatagatgaatccaataacatcggccctcccatgaataatcctgttttgatggaaggaccctcaaaagatttcatctccaattatgatgactatgggtcaggttcgggctccggctctggctccggctctggctcgggttccggctccggaagtggcttcctaggtgacatggaatgggaataccagccaacagatgaaagcaatattgtctatttcaactataagccttttgacaggattctcactgagcaaaaccaagaccaaccagaagacgattttattatatgaatgtgacggtctctgtctccccacctccatgtggaacaatgtattcagtatacttagtgtaccacgtttaaatgaccagtctcaggataaagagttttacagaaaatttaaaatgcctggaaaagactcttgaatcctgttacccctttcctcattaactcgtaaggaattatgctttaatgctgttacctatcttgttgttctggaaaatgcctgcatttatgtgtattgaatcaacatttaagaaattaacacacacccccattattatacaataactttcaaagccatactggttttgaaaattttaatttgatagcaagttgatgaacaatctttcatacctaaagtgttcaggaacccaactcgcattgtgaattacaaatatattcctttatgtgattaaaaagaaaataaagtgaaacacagtggcctcct

SEQ ID NO: 863 - protein, 163 aa, Mus musculus
LLIQRLSGAELVRMQVPVGSRLVLAFVLVWGSSVQGYPARRARYQWVRCKPNGFFANCIEEKGPQFDLIDESNNIGPPMNNPVLMEGPSKDFISNYDDYGSGSGSGSGSGSGSGSGSGSGFLGDMEWEYQPTDESNIVYFNYKPFDRILTEQNQDQPEDDFII

SEQ ID NO: 864 - DNA, 36714 bp, Homo sapiens
  misc_feature (1)...(36714): n = A,T,C or G
gaaatactgttttttgagacaaggtctcgctctgtcacccaggctggagtaaggtggcgtgatcatggctcactgcagcctagacttccctggctcaggtgatcctcccacctcagcctcctgtgtagctgggactacaggaacacaccaccatgcctggctaatttatgtattttttttaaagttggtggtatgtttcaccatgttgtccaggctggtctcaaactcctggactcaagcaatcttcccaccttgacctcccaaactgctgggttacagacataagccactgcacctggtgtggaaataatcgtttgtggtgacacttggattatctacttaacccacaaatgttcttgccattcaaccttcatgattactgtattactctcatccaacttgtaatattcctaactatattgtcttgagttttcaggcagtcccgagtgctaatcttcaacccaatttctttagactcattgtactccaaaggaggttatctaaagtatatcctcctttaacagatttttaaagttaaacttttgtttgttttttgagaaggagtcttcctctgttgcccaggctggagtgcagtggcacaatctaggctcactgcaacctccgcctcccaggttcaagtgattctcctgcctcagcctcccaagtagctgggattacaggcttgcaccaccatgcctggctttttttttttttttttttttttttttttttcttcggcattttcagtagagacaaggtttcaccatgttggtcaggctgatcttgaactcctgacctcaggtgatccacccaccttggcctcccaaagtgctgggataataggcatgagccatcacacctggcctaaagtaaaacttttgtaaacaaccaaaatatttttattgagcctttttcttgattattaatatacataatttttttctacaaaatttagagtagtctggaaaagatgaagaagaaacattggtgatcctactgtccagaaaacaccactgttaattttttggtcaatgggtagctgaaccgattaagttctagagcagcggccgggagtggtggctcacgcctgtaatcccagcactttgggacgctgagggggtcagatcacgaggtcaggagatcgagaccatcctggctaacacggtgaaatcctgtctctgctaaaaatacaaaaaattagccaggtgtggtggcgggcgcctataggcccagctactcgtgaggctgaggcaggagaatggcgtgaacctgggaggcggagcttgcagtgagccgagatcgcatctctgcactccatctgtctgggcgataaagcgggactccatctcaaaaaaaaaaaaaaaaaaaatacatctctagtataatcttggtgtgaagccaagacaagaacatgcaaaaaaaaaaaaaaaaaaaaaaaaaaaagatggagtatggagtattcaatacatatttattcatctattcattcattcagtgccttgagcggaggtgcagaagcacgtcaagctaatcgggaagtttagtccagttgaggatataatcaactaaaggtcatcaaggtgtagagcatttcactgaagttggaagaggagcaacctatttcagtagtagatactatttttttggatggagggtggctgtatcctttcattctttagtgagaattaaaagttaaaatttagctgggtgcggtggcttacacctgtaatcccagcactttgggaagccaaggccggcagatcacttgaggtcaggtgtttgagaccagcctggacaatacagcgaaaccctgtctctacaaaaaatacaaaaattagctggatgtggtggtgagtgcctgtaatcccagctacttggtagggcgagataggagaattgcttgagcccaggaggttgaggctgcagtgagctgtgatccagccactgcactccaacctgggtgacagagccagacctcgtctcaaaaaaaaaaaaaaaaaagttaaaattcatcatgggaaaaaatttttaccatctcaatgaagctgctaaatcgcatttcactaagtgatgctgtttatattttaaatttttaaccaaagcaaaaaaaaaaaaaaaaaaaaaaagcctagagtctggcaaaaaataagaaccaactaaagtgtagtaacttaattggtaaatgtggtcagcctctgggaactgaaatgaagaggccgttgaagatccggttgatgttctgtgattacagattaaggggcaagaacttccttcttccttagtgacccataaccttaagtataattgcaggtatggagtataacggtgtgtgtctggaggagaaggaagtaggggtgaggtaggaaacattgtcactgaatttgggaatttggataggttgcttatctttggagggagctcagcatcttatggtggtagaatggatggatgggttataggattggcaggaatgaaccaggtgagttctggggacattggtggggctatgtactgctgcaggatagggtataaaataagagcaatgaaggaagctgagggggatccagtgtaccagcgagtggtgtgtgctactttgagttgcacactcaagtcatcatgatggaagacatgatagtcataatctctgtgtggtaggtgacaaaggatttgtcctttcattttttaatttttttgagacagagtcttgctctgttgcccaggctggagtgcaatggcacaatctcagctcactgcagcctccgcctcctgggtttaagtgattctcctgcctcagcctcctgagtagctggaattataggcgcctgccaccacacccagctaatttttgtatttttagtagagatagggtttcaccatgttggccagactggtcatgaactcctgatctcgtgatctgcccacctctgccttccaaagtgtcaggatcacaggcgtgagccactgagcccggacttgtcctttcttttaagtccctccttgcaattcttcacctgctgacttttccatagtaagcattaattaattagttaattatttttgagacagggtctcactgtgatgtccaggctggagtgcagtgtcacaatcgtggctcactgcagacttgaattccttgactaaagtggtcctcccaccttggcatcagccactgtgcctggcctattaattgttttgttgtcgttgttgtttttgagagtctcattctgtcgcccaggctgtagtgcagtggcacaatctcggttcactgcaacctccgtctcccgggttcaagtgattctcctgcttcagactcctgagtagctgggactgcaggtgcgcaccaccacacccggctttttttttgtatttttagtagagacagggtttcaccatgttgatcagcctggttttgaactcctgacctcgtgatctgcccgcctcagcctccccaagtgctgggattacaggtgtgaaccaccgcgaccagccctaattttttaattagaaaagatagctaactaaagatagacaaaaataattttagaatagcatcgatagatagtgtgtcttgggagaaaggtaagacttaagaagtcaaataaagacctcttttcttgattcatattcaaagggtcctgctctctctaacccacatatccactcctgtgccctttctgaaatttcccgagagatgtgtttccactatttgtaatatcctatagttttttgtaagtcctatagttttggaattgaaattctgtgtcctattagactcagggtagcattttgagaagttattcaatgcctttctttttttaaaataggattttttggctggacaaagtggcctacacctgtaatcccagcactttgagaggccaagacccaagttcaagaccagtctgggcaacatagtgagaccccgtctctacaaaacaattaaaaattagctgggtgtggtggtgcatgcctgtagtttcagctactcaggaggctgaggagggaggattacttgagcccaggaggtcaaggctgcagtgagccatgactgtattgctgcattccagcctgacaacaaagttgagacggagtcttgctctgtcgcccaggctggggctggagtgcagtggtgcgatctcagctcactgcaagctccgccttccgggttcacgtcattctcctgcctcggcctcccaaagtgctgggattacaggcgtgagccaccgcgcccggcctaaaaaaaaaaacaacttttttaaagaacagttttaggatgggcacagtggctcacgcctgtaatcccagcactttgggaggctgaggcagggagatcacttgaggccaggagttcaagaccagcctggccaacatggcgaaaccctgtctctactaaaaatagaaaaattagctgggcatggtggcacatgactataatcccagctactcaggaggctgaggcaggaggatcacttgaacctggaaggtggaggttgcacagannnnnnnnnnnnnnnnnnnntccaccaaccaaacaaccacgaaatgaagcccggaacccgcccggtaccggccagggggagcctgcactgagccactgcactccagcctgggtgacagagcgagactctgtctccaaaacaaaacaagcagacaaaaaaacaaaaccaagccaataaccccaagttcctcaacttttaggtacctagggaggtttctggactaggactctggagacaaaattttaagaaggggagcaatcatgctcttgggaaaatacatatatatgtatttttagacagagtctccctctgtcgcccaggctggaatacagcggcacagtctcggctcactgcaacctccacctggcgggttcaaggggttctcctgcctcagcctcccaagtagctgggattacaggtgcatgccaccacacctgtctaattttttatatttttggtagagaaggggtttcaccatgttggccagtctggtctcaaactcctgaccgcaagtcatctgtctgcttcagcttcccaaagtgctgggattacaggcatgagccaccgcacgctgccatgggaaactaatattaatagatgtgtggctatggtgatgagaagggaggagctggagaaggagctacacggccctgccagggatgcccttgaaactatgccctcttccagggcatccctacgttgttcctcggtaaggagaccaaggacacaatgagagctgctcccttgggatcagaagcatcaagataatttcctgaccaggtgcgtggcatgtgcctgtagtcccagctacctgggaggctgaggcaggagaattgcttgagcctcggcatttgagtccagcctgagcaacatagcaagactttgtcgtaagaaaaacaaaaggtgatttttttgtcttggccacagtctccctgtccactaaatgattgagggtgggaatggaagtagaaccaaaataataggaaactcaaagttgtctgagatccgtgaaaaaataagccactttttaaaaaaacatgcctttttttttctgtaacaccttttttaaatcagatgttttctcatttatatggactctaaataaaatgaagatctctttttaaaaggataattttttagaagttttatggaaaaaaattttttttttagacaggtctggctctgtcactcaggatgcagtgcagtggcatgatctggctcactgcgacctccacctctctggctcaagctagcctcccaactcagcctcccaagtggctgggactacaggcatgagccaccatgcccagctgattttggtatttttcacagagtcggggtcttgccatgttgcccaggctggtttcaaactcctgagctcaagtgatccgcaaaccttggcctcccaaagtgctgggattacgagtgtgggccactgtgctggcttattatgtaaattctcaaaaatatattaaagtagggaggatagtataatgaaccttcttttactcattgctcaacttcagcagttgtcaaaccaccagtataccctccccatctaccctcaaaccagattatttagaagcaaatcctagtcattttatcatgctaaacagaaatgcttagcatgtacctctacaagaaaataacaaaaaggacttctgattatttacaaatcttaatcttgcttccccttcattcctcatctatcccagggcatggattaggaagcgtgagttctaaccctggtttgccccttgctaaccgtgtgagcagaggcaaatcatttaacctttctggacttgcatttttctcacctgagtgagggaactagatgatttctaagatcccttctagttctagaaatcaaaaattcatgcaagggccgtccttcaagcctctagagacatacagatttggtgcagtatctatttactggtttttgtttgtttgtttgtttgttttgtttttttggtgcagtgcccagttcagagtcaagaccctctcaatgaagagccaagcaaaagtcctagaggctgctggtggcggaatctttaacctggagctttaggaaagaaataggccttggagcttcccctttgtgcagtttcatgctgccctctgtatctcttctcataacctcaatttatcattttttttttctttttttgagatggagtcttgctctgtcacccaagctggagtgcaatggcatgatctctgctcactgcaacctctgcctcccaggttcaagcaattctcctgcctcagcctcctgagtagctggtattagaggtgcccgccatcatgtccagataatttttttgtatttttagtagagacagggtttcaccatgttatccaggctagtctcaaactcctgaccttaggtgagtgatccgcccaccttggcctcccaaagtgctggtgtgagccaccctgccctgccggcgacccgtcactttattaaacaacaggaactgatttctgtcatgttccaggtgactgttaaggaataagaatactcattttatgggcaaataaactgaatgtgaagtaaagtaggtgcatctcaggttgcctggtgaaagaaggattaagtctggtatagggtttgtcttttaaaattgtggaaaacatgcatatcgtagattgacttttagggaaagatgtgggtcctattgggttaatggcggaatcttttggtaagatcatgcccagccctgaggaccgttgccaatgcctccctcaccacgtgtgccatgtgctcttgaggacatcctgtcattggcttcccacaccatcattacatctggaacaagggacgcataaaaagtgagtggcccagcgtggctcagctggtaagtgaagggcatgggcttggacccaggacttccagctgctgcagcatgtgtcctgctcccctacagcttgaagagggctaaatgagactggaggacttcttagaaaaagagacttgattatcagcgtagtgggagaagagcaaatgcttatgaatactgcacctgtgctttaaaagtcaccatgagctgggcgttgtggcttacgtctgtaatcccagcactttgggaggccgagacaggtggatcacttgaggtcaggagttcgagggcagcttggccaacatgacaaaaaccccatctgtactaaaaaaaagaaaagaaaagaaaagaaaagaaagaaagaaaaaaaattagtcaaatgcgtttgcttgaacccaggaggtggaggtacaccctgggcgacagagagagagaggtaaaaaacaacaacaacaccatgacccagagaaagaaagaaaaaaaatgaagttcccaaatggaaaaagcccctaaaattaccattttaaaacacagccctaatcagctctggggatttgcaggaaactcatcgaagctattgataggaactattgttttggtgccagggttttcaattgggagttagatttaaaaggaccaaagatgacatctgatatttcaaacagaaaccgacatttctcagtggaaaactttccgggccagtgcattttggggttggttactgtgcttggagacgcccctgagttggaggacacacttctggctgatgtgaggggcttctgaggagggccaaaatgtacactctttgtgttcttgcaccacggctattagactgtgagactctgtccttagcaggaaatggtaaaggaatcagcaggaagcctaaaacaagggaagggaaactcctccctcctatcaaaggccaggcaagggcgaggatgagaatggaaagtggggcacgtgcattaagccgtctgggggagcggtagggatagacatgttgaaatggagagtggttgaatcttgaaaggaagtaaggaaaatgtatatgccacaagggcaaggatgtatgataggcttgtatttattgtataactttattttattttattttattatttttagttttttgaaatagagtctctctctgtcacccaggctggagtgcaatggcacgatcttggctcactgcaacctctgcctcccgggttcaagcgattctcctaccccagcctcccgagtagctgggactacaggcactcgccaccacgcccggctaattttttgtatttttagtggagacggggtttcacggtgttagccaggatggtctcgatctcctgaccttgtgatccacccacctcagcctcccaaagtgctgggattacaggtgtggaccacagcacctggcctttattgtataactttaatatggagccttagtcctccagaaatctgcaccatgcccagggaaaatgctgttcctttatttacatgaggcagaggtttgtgttgtttgctgaggtccagcagctcactgtgaggacaacctctccctcgttcctgatttctggcttattcaaggccagaggacccaaaactcgagttgaaaattttgactaggagaacagataaaaatagaaatggaatccatcttaagaaatgctcaatgtgaaggagaggggaatgcaaaatagtttttctgttttaccacagtctttgtaactgaaaatcctatgttcttgagatagagagagagccaatgatccaatgcaagaaactgagtttaagaagaaactgtttgctgggcacggtggctcacgcctgtaatcccagcactttgggaggctgaggcaggcggatggcctgaggttgggagtttgaggccagcctggccaacatggtgacacgtcgtctctactaaaaatacaaaattagtccagcgcagtggtgtacgcctgtaatcccagctactcaggaggctgaggcaggagaattgcttgaaccctggagatggaggttgcagtgagctgagatcgcgccactgctctccagcctgggtgacagagtgagactccatctcaaaaaaaaaaaaaaaaaaaaaaaaaagaagaaaaagaagaagaagaagaaactgttcatctgaaatccgacaactcattcttgaaggttagagctcagctttgaagtttcacttcacgagcttggctcagtgaggtatgttactccccggtgaaaaagaaaatgaagagaatgttttatgttgaaagtgcttggtgacgaaaaggcagcacctagatcccttatctcataaaaaatgcagcagattcttaatattagcaatctagtgtttagattgttacctgaagaaaggaaaaacaaactgtcccaaatgctgattctactgtttcggtgggaaaaaaaaatgtcttgcaggcaagtggcaaacaacaaaacttttgaaaaagcaggcctggggggagtccagtacagtttcataatgggtatgaatagttattttactgtgttccccccaccccctttctttctgggttttgatgtggatgtctttctatttgttcaggaaattgtgacgtgtgttctgggcagggtttgaggttttggaacattttctaaaagggacagagagcaccctgctacatttcctaatcaagaagttggcgtgcagctgggagagctagactaagttggtcatgatgcagaagctactcaaatgcagtcggcttgtcctggctcttgccctcatcctggttctggaatcctcagttcaaggtaagactcaggagtcttgttccccagccatcttctctgtaagccctgtggtccatgcaagtcattatattcattttaaggcatagaatgtataatattgtgagaaaggaggcaaagaagaaggatttggggtcgctgaaccctttaatatgagttctgttaagtttggtaccaagaaaaattaaactctgtggcgtgtgcagtcttgtaaactcttacaatgattgaaatgtgctattttgggatgaaaatgtgaggtttataaattttaaaagctcaaaaaaggaatctagaaaatgactcctgtgcctgttgcatggaggagatggcacctttgactgttggggggtgtctgcctacccctaagtgtctacatcagccccaagttttagtgcgctgtgacggtgtcattgttattttaacactgggagacgttatattccaattggggtgaatctgactgtgtgtattttcttttcttttttttttttttaaagataaacttggttcttactgaaaactcaattatggttagacatagttcatgtaaaacctctcagattttaaagagaaggccaaataatttggtatttgtgctcttgctcagagaagcatcatattcggaaatatcttcctaggtttatctaccatttagtgttgtttagtcagactgaaacaacttaaaacctgtaatgactaagacaatgaaaatgataggcttgtaagaaaaatacaatttgttattctttggcaaataaggaatcatgtctaaataagacggaggtcatggcttgatagagagatggctgaacctatagtagaaaaacactaggttccgccaaatggtaagggaaatgttgagtcacaatgacacacatgtcctagatttgtttcgtcaaagcgacttttggttgtcatgatcttacttccggtggagatgaaatcttacagatgatcgcagagacattcattttatgttggaaatttataaaatcattttcttctagttatgctaatgctgaaaaaagagcaagtaatgtttctggaacgttattaatttatgtatttttaaaatataaaacattgtcaattgtagggaacaggcttcactgggatcttttagggaatatcttcagcttgatgaaataattcccgaatagccaagtggtctgacaagatcgagagtaatgaggcccatactttagtacagtcttgaatggccagatggtgctgggcataccccaaccagagatatgtaagtctttatgttgtcaaaatttcccagaaacatgaatttcccactaagattcattaaggaaaactagaatgaaaacaaaaacgttccttgtataatattcattagaaagaaatgaagaaggccgggcatggtggctcacgcctgtaatcccagcactttgagaggccaaggtaggcagatcatgaggtcaggagtttgagaccagcctggccaacatagtgaaatcccgtctctaccaaaaatacaaaaaaattagccgggcatggtggcacacacctgtcatcccagctactcaggaggctgaggcaggagaattgcttgaacctgggaggtggaggttgcagtgagctgagattgcaccactgtactacagcctaggtgacagtgcaagactctgtcagaaagaaagaaagagagagagagagaaagaaaggaaagaaagaaagagaaggaaagaaaataattcatcatgaaattgtatagaatactagcatttatgtcatgacctcgtaggtttagctctttgttagaaaaggaaaccatagaaagagacaagggagaaactgacaaactagggtgtttccgaaaaaaggctctcagtatcgggctcaagggcttgtgcccacatctgagcatgcagggaaatagatgtcccccactggctgcacatgtgagtgactgcggcacaaggctgtgatgtgaagagtcatgacaccatttcctcacacctccacgcaatgccagatatgattcgacaacattcttcctgtcttataaaaagtgtttatctagcccgttggtttggcagatgaaatcaactaggcttttggcttgcttttactgagcatattcaaaaccatttcaggtcactatagtggtttgctcgggttgccataacaaagtaccacggactgagtggcttaaataacagaaatgtatttcctcacagttctggagatgggagtccaagatcaaggtgctggcagggtcgatcgcattctgaggcctctctccttggcttatagatggcgccttctcccttgtctgcacatggcctttcctccatgcatccgtgtcttaataccatcttcttagagggtcaccaggcattggatcagggccaccctaatggcctcatcttaactacctatatctgcaatgaccctatttctgaacaatttcacattgtgagattctgtgggttagaactggaacatatgaatttggtggtggtatatttttattataagtcaaacccaagtaaagatgtggggtaagattgtgtttaccaagcacaaagaaatggaaatttggggatgtgtaactctggagagcacagatgactaatctatttaatgtagggctccaggggatttgatgaggcctgtgaatcttccacttttattgcctctcttttccaatgacacccataaagaaaaaaaatggaatatccatgaacaggtgcagccaaggaggccaggcccgccatgtgtccactgtatactgtctcctagctcacaggaatgatactgatccactccttgtgctgctctttgtaaagtgatttcacatccattctctggtaatcatcatcacattccctgtgatgaggaattagcaccaattatagaggagaaaactggatctgacatttctcatctcatttgctctatacattaacctcttgcaaaaaatttgtgagtcttgcccaagacccattacaactaattaacggctgaactggtcgtctgatttcaaggccagaattaactttctactgcagctcatggatcagaggttttctttatttaaacaaacaaacaaaaaatcctttgaccgtagcccttgctataacgtttcccactgagttgagggagaaattgaaagtaaacttaggagctttttatagcttgtcaaaccatgcaagagtgggggaagcttatccatcttgtggaattgatagaccaggaggaagtaactccggcttagataatgctaccattttgaataaatcaaatggtcttcttttccccttcatggtagttgctgcttaagtttctctaacatgcctgcagtaagtttccattaagaataggaaattaggctcggtacagtggctcacgtctgtagtcttagcactttgggagaccgaggagtgtggatcacttgaggtcaggagttcaagaccagcctggccaacatggtgaaacccccatctctactaaaaatacaaaaattagccaggcatagtggcatgcacctgtaatcccagctactcgagaggctgaggcaggagaatcacttgaaccagggagatggaggttgcagtgagccaagatcatgccactgcactccagcctgggcgatagactgagactctgtctcaaaaaaaaaaaaaaaaaaaaaaaaaaaaagaaaaagaaaagaaaagaaaaaaaaaagaaattagtatattgtgattatgttgagggaaaagttagtaccataatataaaaaggtatggactattggagaaagttgtttgctttggtaacatttactcatagaaagtattttggtaaagcaggactcagggtggtgggggaggtgggcagtgagggataggattcaaataaaaaccattctttcccttggaatccactacacaattaaccaacaaatcccataagtggaccttttaggaagataacatttctatccatgagcatagccactataatcacaagacatttatctcaagcaagatagagtcaagatactctcacaacctcaggggctggaactgtaaattttcacatcctgccaacacccttgaatagctatgtcaagaatttagtgtctgtaacttgttctttattttaaagtacatttaacatcatcggccccaaattagataggcttttggagtgggatcccttctacttttgatttctttataaaattttaaaatagctttgttgagatagtgttcacataccatacagttcacccattaaaagtgttcaattcagtgattaggccaggtgtggtggctcatgcctgtaatcccagcattttgggaggccaaggcaagtggatcacttgaggtcaagagtttgagactagcctggccaacatggtgagaacttgtctctactaaaaatacaaaaattaactgggcatggtggtgtgcacctgtaattccagctacttgggaggctgaggcaggagaatcacttgaacctgggaggtggaggttgcagtgagctgagattgcaccactgcactccagcctggatgacggagcaagactctgtctccaaaaaaaaaaaaaaaaaaagtgttcaatgttttttagtatattcacagagtcatgcaaccatcactataattgcttctagaacattttcatcatcccccaaaagaaagccttcgttacgaattttaattagctgagattctgaactctgggggaattttgtattctagaaatattttttactaatatgctacagttgtatttgtcatgctggtgaaaagatgtggtctttcacctggatgctttctcattaagcattatttttctgtttagcttcctgtgtgagcaaacattttctcagcttgatactcagtgcatcagcggcttgcagaagagactgcctaggcctgctctgtccagtacggtagccacaagtcacttgtggctactgaacacttgaaatgtggcaaggccaaattgggacaggctgtgaatgcaaaatatacaagatttggaacccttagtatgaagaaaagaatgcaaaatatcccagtaataacttttacattgatgatatgttaaaggacaatatttgaatatgttaggttaaataaaattaatttcacctgtttctttttacttttaaaaatatggccgctggaacatttaaaactccctatgtggtttgctttgtgtttctattggacaaagttggtctagacagtacaaggtgtgaagacaccgccctctgctggagaagatgctggatttttatttcacctacaggaagagacgtctaagtagcaattagatgctaaactaatgctgcctcaggaaagaatcaaaagagaaagagtgaaaccaggccgggcgcggtggctcacgcctataatctcagcactttgggaggccaaggcgaggggatcacgaggtcaggagatcgagaccttcctggctaaccccgtctctattaaaactacaaaaaattagccgggcatggtggcacgtgcctgtaattccagctagtcgggaggctgaggcaggagaatagcttaaacccaggtggcggagggtgcagtgagctgagatgtgccacagcactccagcctgggcaacagagccagactctatctcaaaataaggaaaaataaaaaagaaaagaaagaaagtccataaattgagactcctagagatactaaatggtagaatgggaatttgaatttaaatttataagatgttcactctcggagatcataggtcattgttgtcctcctccttttcatgacaggaactagcaatgaagagctctgactatgtgctaggtactactctgagaacctaacatttgtatctccttattaactctattactgccccatcctacagatgagaaaattgaggcacaggaagtttaagttggccaagatcacacagccagtaaggggcagacattgaaaggtcattttgcctgccttatccccagcctccaggcagtggcagagttagctcattttggacaaacagctctcccagaccagacattgtaagctatactcaggaatcataggaaagattatgatagaataatatatagttacaaagaaaagaaagaaaatccaatgggagaatatttactgttttctatattaaagtgtttaatgtttatgtttttagaggaatattgtttattatagcaatttagaaaacaaaatgagaaaaaaaatcaccaaagattctacctccagttatttttgtgtatttccttccatttttccccccatgtctgtttatataattgaaactattattcatgcaaagaggtattctgattttctcagttatttttatttatttttaattttgtaaataaacttttttcttctgagacagtctcgctgtgtcacccaggctgaagtgcagccgtgcaatcttggctcactgtgacctcccagtctcaagcaatcttcctgcctcagcctcctaagtagctgggactgcagatgtgtgctaccacatccagctaatttttaaaatcttttttctcttttttggtagaaatgggagtctctctatgttgcccagcctgtattgaactcctgggctcaagtgatcctcccacctcagtctcccaaagtgctgggatttcaggcatgagctaccacacccaacctaatttttatttttattttattaaaaaaaaaagtttttgcctacccgcctctcaccctctcactcatttttaagtataggtttttctacaatgccacattgtcttttccataaaaagtactttcggccgggtgtggtggctcacacctgtaatcccagcactttgggagactgaggcgggtggatcacctgaggtcaggagttcgagaccagcctggccaacatggtgaaaccccatccctactaaaaatacaaaaattagctggatatgattgtgggcacctgtcatcccagctactcgggaggctgaggcaggagaatcgcttgaacctgggaggcagaggttgcagtgagccgagattgtgccactgcatcccagccagggcaacagagcgagacttcatctcaaaaaaaaaaaaaaaaaagtacttttcttcatttggttagtattctcttatgagttgatgccttgtaatttatctgaatgttttccattattttgtggtgagctttaaaactacccttcctgactttcaagaatcctagacatgctccttcttgctaggtaattattagttgcactcattagaataaagtatatgcttggagtggggaggagatgaactttttgaagggcggtgaagtatttctcaccaccaggcctttgtctttgctaaactgaggaaggaagattttatttcattagctaacaaagaacctcctatataggccgggcatggtggctcacgcctgtaatcctcacattttcagaggccaaggtgggtggattgcctgagctcaggagtttgagaccagcttgggcaacatggcaaaaccccatctctactaaaaatactaaaaattagctgggcgtggtggtgagtgcctgtaatcccagttactccagagggtgaggcagaaaaattgcttgaacccgggaggtggaggttgccatgagccgagatcgtgacagtgcactccagcctgggcgacacagcaagactctctctcaataaaataaaataaaataaatacataaataaatctcctatataacctcataatatcagatttggagccttttccatagaaatgaaattcagaagaagctgagactcagatattccaagctgcctggtgctctgtgaatagaggagacttgttcttgtgaaatctgagtgcaaagacacaggacaaattgttatctacttttcattcctaaggatactgtatggccctaaaacacaagaactagaattctgtgataccacgggtactccacagtgtgttccttcccctttctgaacctgatttgactcatctctatgaaaagatgtgggctttggggtcagatgtgggttggaatcctagcgcctgtgtggctgcaattttcttttgtgtaaaattgagataatagtacaaaagtaacaacagttaatattatcaagtgcttactgtgtgcctggcactgtgttaaattctctaagtgtattttctcatttaatttttgtgataggcttatgacactattagtatcttcatattacagtgagggttcagagaagttaaggttccataactagtcagcagacctgggacttcactccaggcagctgattccaaagcctattctaactttaaactgctactttttggagtgttgtaagaaggacaatttatataaaatgttggcacatagtgggtgctgctgttatatgaatgggcacaaaatctgtctacattttgccttttaccaaatttagaatctatttagttaaaaccttcttagggcgggtggagtgcagttgctcattcctgtaatctcagcacactgggaggccaaggcaggaggattgcttgagcccaggtgtttgagaccagcctgggcacatagtgagacccccatctctccaaaaaacaaacaaacaaacaaaaacaaaacaaaactagctgggcgttgtggtgcccctgtattcccagctactcaagaggctggggtgggagaatggcttgagcccaggagttcaaggttgcagtgagctatgatcacagtactgcactccagcttgggcagccgactgagaccctgtctcgaaaaaaaaataaaaataaaaacttcttaggacagagtgattagaagctgtgtagtagatacttagtaacaatgtgggttcctcgggcaggttatcctacgcagagagccaggtaccaatgggtgcgctgcaatccagacagtaattctgcaaactgccttgaagaaaaaggaccaatgttcgaactacttccaggtgaatccaacaagatcccccgtctgaggactgacctttttccgtaagtggacttttctctaattaattaattaattacttatttatttgagacggagtttcacttttcttgcccaggctggagtgcaatggcgcaatcttagctcactgcaacctccgcctcctgggttcaagcgattctcctgcttcagcctctggagcagctgggatttcaggcgcctgccaccatgcccagctaatttttttttttttttttttttgagacggagtctcactctgttgctcaggctggagtgcagtggcgcaatctcggctcactgcaagctccacctcctggattcacgccattctcccgcctcagcctcccgagtagctgggactacaggcacccgccaccacgcccggctaatttttttgtatttttagtagagacggggtttcaccttattagccaggatggtctcgatctcctgacctagtgatccgcccgccttgacctcccaaaatgctgggattacaggcgtgagccactgcgcctggcctaattttttgtattattagtagagacgggctttcatcatcttggccaggctggtctcaaactcctgacctcaggtgatccacccaccttggcctcccaaagtgttgggattacaagcatgagccactgtacccggccttttctctaattttaaagtgtctgtaatttcacaacctcttggcacagatgtgggagtgtttttcttcaagctgtccagagtgttttgcttcgagctcttgctttggtagtttggctcttactctgcagtacatggtaaaagtgtactgtatatactggcatatgacatgtgcgagtatacatgattcacctatgtttttgaaattttttttgtggatggtagagaggagcattgaggacttttcatcaacaggtattgaaaatgattgaacattgttttatttgtgtaaacagaacacactatatataaaaatccaataattaactgaatggataagcaaaatgtggtataagcatacaaaggaatattattgggtcataaaaagaatgaagtactgatacatgctacaacatagataaaccttggaaacattatgcagagcgaaggaaggccagacaccaaaagccacatattgtatgattccatttagatgaaatgtccagaataggcaaatccctagaggcagaaagtagattagtgggttacaggggctggggaaagggaggaataaggagtgactgctaatgggtatgagggttttttttggaggaggtgattaaaatgttcttctgccaggtgtggtggctcatgcctgtaatcccagcactttgggaggccgaggcgggaggattgtttgagcccaggagtttgaggccagcctgggcaacatagtgagaccctatctctatttcaaatacattttttatattaaaaaaatgttcttcaagtagttggtaattatttttaaaaatggccaggtgcagaggctcatgcctgtaatcccagcaccttgggaggctgaggtgggaggatcccttgagcccaggaggtttgggaccagcctgggccatacagcaagaccctgtctctacaaaaaatacaaaaattagctaggcatagtgatgtgcacctgtggtcccagctactcgggaggctgaggtaggagaatctcttgagcctatgttgagcctgcagtgaaccctatttatgccattgcactccagcctaggcaacagagtaagactctgtctcaaaaaaagaaaaaaaaaattagggaaaggaagaataattagccaagacttgtaaaacaaaaatcaaatctcttcttttgatcacataaaacttgctttaaacttgcaaaaaagacctgatataaattcataagtaacaaaaaattgaattatattagaaaccattaattcaatgaatactaaagctatgtaggatgtagcaaaatatacatattaagaaaaggattatcataaaagttttaatctccaggctcaaacctagaaaatcactctcctcaaagccagggttaatcatcatgctccaaaccaggtacatttcacatcactttgggatcctggcaactttctcttttgttttttttttttttttgagacagggtctcctctgtcacccaggatggagtgcagtggtgtgatcatagctcactgcagcctcgaactcctcaagtgatcttcctgcctcagcctcccaagtagcgggaccacaggcacacagcaccatgcccatctaattaaaaaaatttttttttgtagagacaggggtctctgtacatttcccaggctggtcatgtactcctaagctcaagcagtcctcccacctcagcctcccaaagtgccggaattacagtcatgagccaccattcccagcgctggtgactttctccatcactggtgactttctccatcactggtattcactgcattagtgatgacatcattacaatcttcaatatgcaactttgtagtcctactcttgcattcttactttaaagcctcagcattaagtttgaatgtaatattacagcatccttcattactttaaatcattggtttcaatagtaattcatttaaatctaaaatgttaggctgcagtggctcatgcctgtaatccccccagtttgggagactgaggtgggagaatcacttgaggccaagaatttgagaccagcctgggcaacacggcaagaccccatctctaaaaattagtggcccggcgctgtgcctcacgcctgtaatcccaacactttgggaggccgaggcggatagcttgaggtcaggagttcaagatcagcctggccaacatggcggaaacccatttctactaaaaatacaaaaattagctgggcatggtggcacgcctgtaatcccagctattgagaggccgaggcaggcagactgggaggccaaggcaggcagattgctttgagacctgcctgggtaacatggagaaatcctgtctctacagaaaaatacaaaaattagccaagcatggagaaacctcgtctctatagaaagacacaaaaactagccatgcatgcctgtggtccagctactcgaaaggctgaggtgggaggattgcttgatcctgagaggtcaaggctgaagtgagccatggtgtggcactgcactccagccagggtgacagactaaaaccttgtctcaaaataaataaacacatttaaaataaataaatacaattaaaactaaaattaaaaaataaaataaaatgttaagagaatagctcaaattctccaaaagaactcttgcacaccattcctcctcttctcaaatctctattttccttccccaaagccagtaactgcttctcaccctgaccctgtgctttctttcccgtcattgcgaaagaatggtccttgcttctgtgctgatcccaaacccttttgccctcagatcctcctgtccttccctggccctgctctgtattggctgtggggtgggggtggcggtggaactgacccctggggtctgcatttctcaggctcccagggctgtggctgactttggccaatgggaggcaaggacgggagactgagagcttgggaggaagggagagaggtatgtttcttctccttactccctgcctggggtggcaccttgggcaggactctgttttgcccatggcctcagctcccaccagatgcctctagtccctgggctcaggaaatagacaacctccttccactatcgctgtagcccaaggagggaagtattttttttctttctttctttctttttttttttttttttacagagtctcactcttgttgcccaggctggagtgcagtggtgcgatctcagctcactgccacctctgcctcccgggttcaagtgattctcctgcctcagcctccagggtgtgccactatgcccagctaatttttgtatttttggtagagacggggttttgccatgttgaccaggctggtcttgaacttctgaccccaaatgatctgcctgcctcgtcctcccaaagtgctgggattacaggcatgagccactgtgcctggccgaaggaaatattttcttgctattgctaatctctgggttacctcgctatcccccatttagcttcacttctcctccatcacctgtatgaggaattccctctgtgttaaatatctggagaagtttcctgattggaccctggctgttgcagcttccaaggccacctctctttgtggctggtatccttttcccatgcatcttctccaggacttccattctgcagttatctctctgaactcagtgtcttcttcccatcagtataggggtggactttagtatctcctatgtttaggcaacatctctcctttgactctgcgtcttctccagtggttgcccttctctgctcctcttcacaataacacctcctgaaagggccacccatgcctgccccctcctttcctcaccccctctgtggctggacttctgttcctacactccaccctggttgacaaagtcactgattacttctctattttcagcttacttgatccttaattgccttcaaaaacagctaactgggccatgcatgtaatcccagcacttcgggaggccaaggcaggaggatcacttgagcccaggagttcaggaccagcctgcctgggcaacatagtgagaccctatctacaaaaaatagaaaaattagccgggcgttgtgactcatgcttgtggtcccagctacaaaggaagctgaggtgggaggatggcttgagtccgggagggtgaggctgcagtgagccatgatcacgccactgcactccagcctgcacaacagaaggaggccctttctgtaaaaaaaaaaatggttgaccactccttccttgaaatgcttttttcttgaggcttccatgccctgccttatcctgtttcttcctacttctctggttgtgctttttcctctgctcagtatttaacatgttggtgtgaccctggctctggcctgggcccccttctctatctacatgctttctctcgacgacctccatcggttgcatgggtttaactaccaaatctgtgattctagctccgacaccccaggctaaagtagccacctggtcactccctattacattggtcaatttcatttctctgtgccacctatgattttcctgatttatttattcacttttcattgtctgtcttccccactaaaataaaaacttcttgagaaggggcttcatcgatctgcctctgttctatcccaggccctcaaaacaaggaccagatattcaacaaatatttattgaatgcgtacatgaattaaaactctaattggttgtatgctggtggtttattattttcatggaggaaatgacttgtaggctgtgacactcagcttttgtctctgatgctttgttgccctgttctgtcaccgagggctgtcgtcattgctctggccattttgtgctctttgaatttctaatcatcacactcaacccagaaggcagccttacctttcagcactcttcagctgaatgagtgcaagttggaggcagggtcattttttgataggaaattgaatgtttatatgctggtaaatataaagcttagctttttacaaagaatttctcaaaagtgagctttgttgaagccctgtaaattgttagaacttttatggaaattttaatttaggaaaaaatgtcatctgtttgggctgacttagttgttagttgtttgtcctttcttttttttggtggagggtatggagttttgctcttgtaacccaggctggagtgcagtggcgcgatctcggctcactgcaacctccgcctcctgggttcaagcgattctctcacctcagccttccgagtagctgggattacaggcatgcaccaccacacttggctaatttttgtattttaagtagagaccgggtttcactatgttggtcaggctggttttgaactcctgacctcaagtgatcacccaccttggcctcccaaagtgcttggattacagacatgagccaccacacccggccaagaggacttcttttaaaaatgatttcttgggccgggtgcagtggctcacacctgtaatcccagcactttgggaggctgaggtgggtggttcacaaggtcaggagtttgagatcagcctggccaatatggtgaaactccatctctactaaaaatacaaaaattagccaggcatggtggcgcacccctgttgtcccagctactcgggaggctgaggcaggagaatcacttgaacctgggaggtggaggttgcagtgagccgagatggcaccactgcactccagcctgggcaacagagcaagactctgcctccaaaaataaaaattaaaatgatttcttaagtaaatttcaaatatagaatgtatatgctagtgataacaaaattaacactgtttatgcaagtctgcaataggtagatgtgaagttgataggtgcaataagtataggcaaacacataggaacatttgacctgtttttttgttgattttaaaacattgaataattgggaagcttttaaatctcttaatttgagcaactagatggctgtatttatctccttatattaaaaaaactattataattatctttcccacatatcaaactccactggtttttttcccatttttctttcatacttcagaaagacgagaatccaggacttgaatcgtatcttcccactttctgaggactactctggatcaggcttcggctccggctccggctctggatcaggatctgggagtggcttcctaacggaaatggaacaggattaccaactagtagacgaaagtgatgctttccatgacaaccttaggtctcttgacaggaatctgccctcagacagccaggacttgggtcaacatggattagaagaggattttatgttataaaagaggattttcccaccttgacaccaggcaatgtagttagcatattttatgtaccatggttatatgattaatcttgggacaaagaattttatagaaatttttaaacatctgaaaaagaagcttaagttttatcatccttttttttctcatgaattcttaaaggattatgctttaatgctgttatctatcttattgttcttgaaaatacctgcattttttggtatcatgttcaaccaacatcattatgaaattaattagattcccatggccataaaatggctttaaagaatatatatatatttttaaagtagcttgagaagcaaattggcaggtaatatttcatacctaaattaagactctgacttggattgtgaattataatgatatgccccttttcttataaaaacaaaaaaaaaaataatgaaacacagtgaatttgtagagtgggggtatttgacatattttacagggtggagtgtactatatactattacctttgaatgtgtttgcagagctagtggatgtgtttgtctacaagtatgattgctgttacataacaccccaaattaactcccaaattaaaacacagttgtgctgtcaatacctcatactgctttacctttttttcctggatatctgtgtattttcaaatgttactatatattaaagcagaaatataaccaaaggttaagctgtctcggatctgttgttctaaacccaggaaacagttatttttggccagacgtttctccagaagtcttatcaacaaaacaactttaaacgtattctacagtaaacacaagttttgtaaccagaatcaaatcatactaactagcaaatgaagaaagcaatgatgccttagcaagagggttatatatctcaaagcacttcctcacctgaaagatagttccatctctgttccccttagttctgaaaagcccccttacatcaccatcctggattctgttctgtactgtccagatcccagctccagaactgagtacttactcaaattaatctcctcaggagagagccaccttgcccaaggtcatgctgctttgcagggcagcctgcatccagtgactggctgatgtgggcatatcaaggcctgaactcagaatagtcatacagattcaaaactccccacaggatcagctccagttttgctgggactactttgtagctcagtttcttctttactcaattttacttccttccattccgctcataggtttctatcctgagagtgctcccttagaaattttctgctagtttccatctcagaatttgcttctaggagaacacaacttgtgacaggttgtgccaggagggataagaaatggatgctaagatgggattttggagctagattgcctgctgtctggctggcaatgaggactccatccttggccatagatgagcacaggcacaagatagcagtgcaattgttaaaactttcactggtgatgaaccaagatggtataccagtggaagggagtgcactagggtgtgatgtactaggcatctgagaaatgttggcaagtagtaataataaagacaatggtattggttggctattgctggacttaattaatgcttttgaaaaagacaatgaaaggctaaggacaattaattaaaagctaaatgtgaaaaccattgggcctccttggcagcatattaagaaactctcttctgtaatagaaggaattaaaaagctgaggaccaggcccaggacttatgagaatagcagatggctgggtgtggtggctcacgcctgcaatcccaacgctttggggggctgaggcaggtggatcacctgaggtcaggagtttgagatcagcctggccaacatggcgaaacactgtctctactaaaaatacaaaaattagccaggtgtggtgacaggcatctataatcccagctactccggaggctgaagcaggagaattgcttgaacctaggaggttcaaacctgggaggttgcagtgagctgagatcatgtcactgcaatccagcctgggtgacagagggagactctatctcaaaaaaaaaaaaaaaaaaatagcagagttccaagaatattaaattgtcagcttagcccagtctgttatgcaagctcagagtccttactggggaaaaataggaccctgagagatggaaacatctgggctgatacattcaagttttaaatcctcagattcctttgaacctctgaatctacagaagagtcccatgctttaaggaccgatgctggccaggtgtggtggctcatgcttgtaatcccagtactttgggaggctgaggtgggcagatcacttgaggtcaggagttcaagaccagcctggccaacacagtgaaaccctgtctctactaaaaatacaaaaattagctggttgtggtggcgagcacctgtaatcctactcggcaggctgaggtatgagaatcacttgaacctgggaggtggagtttgcaatgagccgagatcacgccactgcactccagcctgggtgacagagcgagactctgtctcaaaaaaaaaaaaaaaaaaaaaaaaaaaaaacagcaatcaaaaaacaaaaaaactagtgctttcctgttgaagacaatcaagaggcctctacccttaaagacaacactcactctccttcaagatctgtccccacctcccttcctagacagcagataaatatcaaagttaagtcagtataaaccaacaggggagttttgggcttgctcaggaggaaaggtaaaatactctgaaagttctgtagaacttagctaacgtggaccttaaaagctaagagggtgtctgtaagacttaactctggaagtccttgatccagggacggagatagaacacaaacttggataagggagtgtttagcaatgtgagtgtaccctcctgggatacaggttttaatgccctggcaagaaccctgggagaaggtgttgagactctgctaaaatgactcttagacacttggagaaagtgacagcccacacttaagtgaagtggaaatactagaattgtcatgccaggcagtggaaaaaggggtcaataggattaaggaaatgcacatgatagaatgaatggactatataagccttgcaaacccaccagatgactgtcttgcaggaaggccaaagcaataaagaatagcctggtgagagcaatcagcacctctgagccatctgcagtggctctcctctgaaaggcagggctgatgttgttacataactgggcttattaatagcagtgggaataaagggtaccaaaataatagagaccaggtggtagtgctcaaccatcagaagccaagaggtgcagttacctttttttttttttttttggaaatggagtctcactctgttgcccaggctggagtgcaatggcgagatctcagctcactgcaacctccgcctcctgggttcaagcaattctcctgcctcagcctcctgagtagctgggactacaggcacacgctgccacacctggctaatttttttttttttttttgtattttagtagagatcaccgtgttgcccaggctggtctcgaactcccgagctcaggcaatttgcctgccttggactcccaaagtgctaggattacaggcatgagccaccgcgtccagccaagaagccaagaggtgcagttatcttaatgagcagcaaggtcagagatgtatccaggggagcctcatgggcactgagataggagatggcatctctagaggcaatgtagttgcacagccagcaaaagtattgctcaatctattgtattaagcagggtttgccagagagacagaaccactaggacatatacttagatatatgagaggaggtttattagggcaattggctcatgtgatggtggaggccatctgcaagctggagaaccaaggaagctggtagcatagctcagtccaagtccaaaggccttggaccagggatccagggatatggcagatcttccgcacctggtctaccaactcacactctaatctcctgacgaaataacttcacagatacacccagaaataatgctttacctcctatctaggtatcccttaatccagtgaagttgacatctaaaattaaccaccacattattcaaccagaaagatcaagatggtcaggaggcatagggcaattgcctcaataaaaaaacactatggtggctgggcgtggtggctcatgcctatagtcccagcactttgggaggccaagatgggcggatcacgagatcaggagttggagaccagcctgaccaacatggtgaaaccccatgtttactaaaaatacaaaaattagccgggtatggtggtacgcgccgggtgtggtggctcacacctgtaatctcagcactttgggagactgaggcaggtggattacaaggtcaggagttcaagaccagcctggccaagatggtgaaaccccgtctctactaaaaatacacaaattagctgggcgtggcggcagggtcctgtaatcccagctactcaggacgctgaggcaagagaatcgcttgaacccgggggacggaggttgcagtgagccgagatcgagccactgcactccagcctgggcgacagagtgagactctgtctcaaaaaaacaaaaacaaaaacaaaacaaaacaaaaaacaaagaacgcaggaatgctggtccccaatgcacctccatttaattcaccagtctgggcctcacaaaaagcaaatggagagtgctagtggactattacaaattcaaccgagtacagagggtccccaacttacaatgatttgacttaatgattctttgactttatgatagtgtgaaagtgacacacattcagtagaaactaaatttcaatttttgaattttgacattttcccaggttagtgatatgtgatgtgatgctctctggcggtgttgggcagcactagcgagcatggtttttcgctttcagtattcaatacattacatgagacattaaaactctttattacaaaataggctttctattagattattttccccaactgtaagctaatgtaagtgttctgagcatacttaaagtaggctaggctaaataaactatgatgtttgatacgttaggtgtatttaatgtgtttttgacttaagatatttttggctgggtgtggtggctcacgcctgtaatctcagcactttgggaggccgaggtaggcggatcacctgaggtcaggagttcgagaccagcctggccaatatgaaaccttgtctctactaaaaatagaaaaactagctgggtgcggtggtgcacacctgtaatcccagctactccggaggctgagataggagaattgcttgaacctgggaggcggaggttgcagtgagcgaagactgcgccactgcactctagcctgggagacagagtgagactcagactcaaaaataaataaataaataaataaataaatattttcaatttatgatgggtttattgggatgtaaccccactgtaagttgaggtgcatctgtagtagctctattgaagcagcatccccaggtggaacacttttgctagagcagagttacatagctttagatacctaatagtcatttatttgacaaatgctttcttttatatccctatcaaaaaaagaggataaggctgggcacagtggctcatgcctataatcccagcactttaggaggctgaggtgggagaatcacttgaacccaggagttcgagaccagcctgggaaatatagcgagacctcatctctccattttttaaaagaggatcagaggccaggcgcagtggctcatgcctgtaatcctagcattgggaggccaaggtggatggatggcttgagctcaagagttcaagaccaacctgggcaacatggtgaaactctgtctctacaaaaaatacaaaaattagccagttgtagtggcatgcgcctgtagtcccagctactcaggcagatgaggtggaaggttggcttgagcctgggaggtagaggttgcagtgacctgagattgcgccactgcactccagcctgggcaacagagccagaccctgtcaaaaaaaaaaagaaaagaaaagaaaaaagaggatcagaaagagtttacgtactcttggaacagacggcagtatatttacagtctattcccaggactattttaactctcccactctttgtcatagtaccatctaaagagacctgaactggctggacatctcacagaaaatcacagtggtcactgaccagacccccatgtcattgccactgatgcaccagcatttcttcctgggctcacatctatgactgtatgagggcttcctaatgaccaactgccaggataggaataaactccagcttggttcacacatggattggtctggtatatgggagcaagccaaaagtggatgtcagctacactacaatgccattcaggagtggacttgaaaagcagctttgaggggaaatcctcccagtgagcaggagcactgggtggtgctcctggccatccactctgtgtagagagagaagtagcctgaggttggaagatactcatttgcatggactgtggtgactgttttgcccagttgataaggggtctaaaacagaaagattggaagattgggcacgaagcagctcagggtaaaggcatgtggatggaccaatgagagaagacaaagtgtgaagatgtacgtatcaaatgtgaatgcccaccagaaaacatccatcacagaagaggcactaaacaaccaggtagacaaaatgacttggacagatgtcagtcagcctctgtcatgggccaccctaaaactggcacaatgagcttaggaaggagtggccacagtggcagtgatggaggccacacatgggctcccgctgaccaagattgatccagctactgatgttgccaaatgtccagtatgctagcaacagagctcattgctgagccactgatatggcactatccctgaaggagactttggtggctagttgactacattaggtcccttccatcatggaagggccagagatttgtttgaacagtgatagagatgtatttcaggtatgtgtttgcctttcctgctcaggggatgtctaacactaaaatctaaggacttacagagtatgtttgatttatcaacagggttttgcatataacatcacatcacagcataacagcaggagatgcagcagtgggcacacgaccatgggctccactggttttatcacccaccacatcacctcagtgccctcaacatgacagaatgttggaagggcctgttgagggcacagctgaggcaatgcttggctatgatacactgaggttggcgtcacaaccttcgggatgcagtttacatgctagatcagtaacctttatatggtgctgtgtccttaataggtagaatacatgggtccaggaaccaaggagtggaagtacaaaaggactcaacatcgaaactacgtggggtgtttagctggacacaatggctcaggtctgcaatcccagttacttgggaggctggggtgggaggattgcttgaggccaggagttcaagagcagcctggacaacataaaagaccctgtccccttatctaacaaataaaacaaaacaccacttgtggaatttattcttcctattaccgcaaccctgagttttgcatatttagatgttatgattccctgtgggaaatgtttccaccgggggacatggtaagtgtcgtattgaactttaagctatggcatcttaagctctttttggcaagggatgaatggtcaagaagtcaccatcttggcgggggctatgaacctgattatcaagaggcagggctgctgctacacagtggggacagggaggcctacgcttgacacccaagtgatccactgaggcttctctgagtatttcgaagaagtactaatggtttaatggtaaatggataaatacagcagccaggcctgagaagaacctgccaactaggggctcagatcctcatggctgaaggtctgggtcaatcctccaactatgctatctagactagcagaggtgttagccaagggtgagagaaatctagaattgatagtagaggaggcatttaatgagtatccattgtagtcttgataccagctgcagtggcagtggctgcaattcattccactgacctttctccaggaaaagagccctgcagtatcctgaaagagctgttcccagaatttatatgaagcaaaaagatctaagtggcacaaggggtaaactgttacgaatgctgtgctgtgttaccgagattccccctttgggactggaagatctattccctcggccacaggaaaggttggctgacggctgcaagttcttagatgcagagagccagttcatccaaggtcatgctcccttctcatggacagctcacagtcaaagactcatctatgtgggggtatagagtctcagagctcatgctccacttggaacaactcagaagaaacaccccaacttcagaactctctatttggtcagctgatgccttgtgattatactgcagctcaatttattcctctctaatcctgtttccttctcgttctgcacaggtgtttatcctaaggcaactccatcattaacttcctccatgctattcatcctctcagagtttgcttctcatagaacacaactcataggaatatgtttatagcattttacttttggtgacagttgtaaattataccctgatctttctgttaataaatctgagattatttaacaggaacttagttagttttatgcccaatggggtattactgtcaagaggcctatttttggcttccacatgatacagcagagaaaacaaggcacgttttagaaaatacacctgttgctttgtatcactagttaagtgctaggttttacacctttaaaggagaggtaggtagtctaggttttaaaacatgacattcttttttttttttgagacagagtctcgctctgtcgcccaggctggagtgcagtggcgccatctcggctcagtgcaagctccgcctcccgggttcacgccactctcctgcctcagcctcccgagtagctgggactacaggcgcccgccaccacatccggctaatttttttgtacttttagtacagacggggtttcaccgtgttagccaggatggtctcgatctcctgacctagtgatccacccgccttggcctcccaaagtgctgggattacaggcttgagccactgcgcccggccaatgacattcttgttaaaaaagatcttaaacttgccacaaagaaactgtagaatatttctgttttgtagaaagagttnnnnnnnnnnnnnnnnnnnngcccgcagcccgcgccgcgcccgccccgcccccggcgacggcgcgcccgcccccgcccccggcgccgcccccgccccccccccgccccgccccccgcgccgcgcccccggcccccccccgccccccggcgcccgccgcccccccgcccgcgccctcccccccgccgccggcgccgccccgcccgcccagctccgcgacgcgccccacaccccccgcacccacacccgggccccgcacacacagtttcagttttagcattgcaaagtcctggcttaaataccagttttactctttattagctgtgtaagtttagacaactagcctaatttagctaagcttgtctagggagagcagtatagtaaggggttaattgtgtggactccagagccagatcatctggattgaaagttctgttggccggccgcagtggctcatgcctgtaatcccagcactttgggaggccgaggaggggcggatcacgaggtcaggagatcgaaaccaacctggccaacatagtgaaaccccatctctactaaaaatacaaaaattagccgggtgtggtggcacgtgcctgtaatcccagttacttgggaggctgaggcaggagaatcgcttgaaccagggagttggaggttgcagtgaaccgagatcatgccactgcactccagcatggtgacagagcgagactccgtcacacatacaaaaaaaagttctgtcacttaccaactagataagcttagatgagttacctaacctctctatacctcagtttcctcctttttaaggtgaggataatgatagtacctactttgtaggtttgttaaaaagattaaacaaattaatacatgtaaagtgctagagacaatgccattgagcaactgatcaataaacatgagctattatcactacttgtactataggttaacaatacttgcccaaggggttgtggtgaagattaaatgaggcaatgtatacaatatagttagctcagtgtttggcaaatagtaagcccctaaaaaattgtaatcatgaaaatgtgtgttgattgacagatagagcccaaaacgtaaaagagtaagaatttaaaaacctacacaacttaaaaaaatttaagagtaagaattttaaaaactacacaaaactacacatgctatttcataagattatctatgtgctaggtgatgggaatacagagggaaacaagtacacatcagatggcatttgtccttgagcttagtctaacagggtttgaatgagagtgaatgtaacatgttagtcttgcctggcactaaggaaggtattatgtgagtgcaatagtaattgcggtttttgcattgttggaatttgctgtttg

SEQ ID NO: 865 - DNA, 1215 bp, Homo sapiens
tacatttcctaatcaagaagttggcgtgcagctgggagagctagactaagttggtcatgatgcagaagctactcaaatgcagtcggcttgtcctggctcttgccctcatcctggttctggaatcctcagttcaaggttatcctacgcagagagccaggtaccaatgggtgcgctgcaatccagacagtaattctgcaaactgccttgaagaaaaaggaccaatgttcgaactacttccaggtgaatccaacaagatcccccgtctgaggactgacctttttccaaagacgagaatccaggacttgaatcgtatcttcccactttctgaggactactctggatcaggcttcggctccggctccggctctggatcaggatctgggagtggcttcctaacggaaatggaacaggattaccaactagtagacgaaagtgatgctttccatgacaaccttaggtctcttgacaggaatctgccctcagacagccaggacttgggtcaacatggattagaagaggattttatgttataaaagaggattttcccaccttgacaccaggcaatgtagttagcatattttatgtaccatggttatatgattaatcttgggacaaagaattttatagaaatttttaaacatctgaaaaagaagcttaagttttatcatccttttttttctcatgaattcttaaaggattatgctttaatgctgttatctatcttattgttcttgaaaatacctgcattttttggtatcatgttcaaccaacatcattatgaaattaattagattcccatggccataaaatggctttaaagaatatatatatatttttaaagtagcttgagaagcaaattggcaggtaatatttcatacctaaattaagactctgacttggattgtgaattataatgatatgccccttttcttataaaaacaaaaaaaaaaataatgaaacacagtgaatttgtagagtgggggtatttgacatattttacagggtggagtgtactatatactattacctttgaatgtgtttgcagagctagtggatgtgtttgtctacaagtatgattgctgttacataacaccccaaattaactcccaaattaaaacacagttgtgctgtcaatacctcatactgctttacctttttttcctggatatctgtgtattttcaaatgttactatatattaaagcagaaatataacc

SEQ ID NO: 866 - protein, 156 aa, Homo sapiens
MMQKLLKCSRLVLALILVLESSVQGYPTQRARYQWVRCNPDSNSANCLEEKGPMFELLPGESNKIPRLRTDLFPKTRIQDLNRIFPLSEDYSGSGFGSGSGSGSGSGSGFLTEMEQDYQLVDESDAFHDNLRSLDRNLPSDSQDLGQHGLEEDFML
